(19) United States
(12) Patent Application Publication
(10) Pub. No.: US 2026/0141980 A1
(43) Pub. Date: May 21, 2026

(54) SYSTEMS AND METHODS FOR DESIGNING AND USING OLIGONUCLEOTIDE PROBES

(71) Applicant: Singular Genomics Systems, Inc., San Diego, CA (US)

(72) Inventors: Kenneth Howard GOUIN, III, Oceanside, CA (US); Michael Lawson, Pasadena, CA (US); Andrew Pawlowski, San Diego, CA (US)

(21) Appl. No.: 19/249,642

(22) Filed: Jun. 25, 2025

Related U.S. Application Data
(60) Provisional application No. 63/664,466, filed on Jun. 26, 2024.

(51) Int. Cl. G16B 25/20; C12Q 1/6834; C12Q 1/6855; G16B 30/10

(52) U.S. Cl. CPC G16B 25/20; C12Q 1/6834; C12Q 1/6855; G16B 30/10; C12Q 2600/16

(57) ABSTRACT

Disclosed herein, inter alia, are oligonucleotide probes for immuno-oncology target molecules and methods of use thereof.

### CROSS-REFERENCES TO RELATED APPLICATIONS

[0001] This application claims the benefit of U.S. Provisional Application No. 63/664,466, filed Jun. 26, 2024, which is incorporated herein by reference in its entirety and for all purposes.

### SEQUENCE LISTING

[0002] The instant application contains a Sequence Listing which has been submitted electronically in XML format and is hereby incorporated by reference in its entirety. Said XML copy, created on Jun. 20, 2025, is named 051385-625001US.xml, and is 13,679,352 bytes in size.

### BACKGROUND

[0003] While all cells within the human body contain substantially identical genetic material, the activation of specific genes varies among different cell types. These variations in gene expression are fundamental to both normal and pathological biological functions. Detecting and quantifying these gene expression patterns in normal versus diseased cells can be instrumental in identifying new targets for drug development and diagnostics. Disclosed herein, inter alia, are solutions to these and other problems in the art.

### BRIEF SUMMARY

[0004] In an aspect is provided an oligonucleotide probe including a sequence at least 80% homologous to SEQ ID NO:1 to SEQ ID NO:11418. In another aspect is provided an oligonucleotide probe including a sequence at least 80% homologous to SEQ ID NO:11428 to SEQ ID NO:15539. In an aspect is provided a method of detecting a nucleic acid molecule. In embodiments, the nucleic acid molecule is in a cell or tissue (e.g., in situ).

[0005] In another aspect is provided a computer-implemented method designing an oligonucleotide probe for a target gene. In embodiments, the method includes generating, by a processor, a plurality of probe sequences.

### BRIEF DESCRIPTION OF THE DRAWINGS

[0006] FIG. 1. Illustration of a code probe. A code probe is a single-stranded oligonucleotide that includes a first code-foot (e.g., 3′ code-foot) and a second code-foot (e.g., 5′ code-foot) on either end and is linked together via a linking oligonucleotide sequence. Each respective code-foot serves two purposes, binding to a specific target sequence, and following circularization, each code-foot may be detected to provide an identifier for the target sequence. The linking oligonucleotide sequence may include one or more primer binding sequences (e.g., an amplification and/or sequencing primer binding sequence).

[0007] FIG. 2. Determining off-target hits. An off-target hit must have ≥3 bp aligned on both sides of the ligation junction in order to be considered an off-target. Shown in FIG. 2, an off-target code probe is identified, and should be discarded from the optimized probe set.

[0008] FIG. 3. Example workflow for generating circularizable probes, referred to as padlock probes (PLPs) that each include a first hybridization sequence (code-foot 1) and a second hybridization sequence (code-foot 2). For a particular gene of interest, all possible foot-pairs (i.e., code-foot 1 and code-foot 2) are tiled across each exon for a target gene. A first filtering process removes any probes not having the desired GC content and removes probes where the foot-pair includes shared sequences (e.g., sharing a sequence ≤8 nucleotides). A second filtering step subjects the remaining potential code probes to additional filtering. For example, the pool was further refined by eliminating any code probes that overlapped with known transcriptome sequences. Oligonucleotides that had overlaps with each other were also removed. The remaining code probes were filtered to remove any code feet that had a melting temperature of less than (or equal) to 42° C. for off-targets; and further filtered to ensure any remaining code-feet included a melting temperature of greater (or equal) to 50° C. for on target sequences. Since the hybridization sequences function as identifying sequences, a degree of uniqueness to each sequence to facilitate multiplex determination is advantageous. For example, the optimized PLPs included a Hamming distance of greater (or equal) to 3 in the code foot, and any code feet not meeting these criteria were discarded.

[0009] FIG. 4 depicts an example system that may execute techniques and methods presented herein.

### DETAILED DESCRIPTION

### I. Definitions

[0010] All patents, patent applications, articles and publications mentioned herein, both supra and infra, are hereby expressly incorporated herein by reference in their entireties.

[0011] Unless defined otherwise herein, all technical and scientific terms used herein have the same meaning as commonly understood by one of ordinary skill in the art to which this disclosure belongs. Various scientific dictionaries that include the terms included herein are well known and available to those in the art. Although any methods and materials similar or equivalent to those described herein find use in the practice or testing of the disclosure, some preferred methods and materials are described. Accordingly, the terms defined immediately below are more fully described by reference to the specification as a whole. It is to be understood that this disclosure is not limited to the particular methodology, protocols, and reagents described, as these may vary, depending upon the context in which they are used by those of skill in the art. The following definitions are provided to facilitate understanding of certain terms used frequently herein and are not meant to limit the scope of the present disclosure.

[0012] As used herein, the singular terms “a”, “an”, and “the” include the plural reference unless the context clearly indicates otherwise. Reference throughout this specification to, for example, “one embodiment”, “an embodiment”, “another embodiment”, “a particular embodiment”, “a related embodiment”, “a certain embodiment”, “an additional embodiment”, or “a further embodiment” or combinations thereof means that a particular feature, structure or characteristic described in connection with the embodiment is included in at least one embodiment of the present disclosure. Thus, the appearances of the foregoing phrases in various places throughout this specification are not necessarily all referring to the same embodiment. Furthermore, the particular features, structures, or characteristics may be combined in any suitable manner in one or more embodiments.

[0013] As used herein, the term “control” or “control experiment” is used in accordance with its plain and ordinary meaning and refers to an experiment in which the subjects or reagents of the experiment are treated as in a parallel experiment except for omission of a procedure, reagent, or variable of the experiment. In some instances, the control is used as a standard of comparison in evaluating experimental effects.

[0014] As used herein, the term “complementary” or “substantially complementary” refers to the hybridization, base pairing, or the formation of a duplex between nucleotides or nucleic acids. For example, complementarity exists between the two strands of a double-stranded DNA molecule or between an oligonucleotide primer and a primer binding site on a single-stranded nucleic acid when a nucleotide (e.g., RNA or DNA) or a sequence of nucleotides is capable of base pairing with a respective cognate nucleotide or cognate sequence of nucleotides. As described herein and commonly known in the art the complementary (matching) nucleotide of adenosine (A) is thymidine (T) and the complementary (matching) nucleotide of guanosine (G) is cytosine (C). Thus, a complement may include a sequence of nucleotides that base pair with corresponding complementary nucleotides of a second nucleic acid sequence. The nucleotides of a complement may partially or completely match the nucleotides of the second nucleic acid sequence. Where the nucleotides of the complement completely match each nucleotide of the second nucleic acid sequence, the complement forms base pairs with each nucleotide of the second nucleic acid sequence. Where the nucleotides of the complement partially match the nucleotides of the second nucleic acid sequence only some of the nucleotides of the complement form base pairs with nucleotides of the second nucleic acid sequence. Examples of complementary sequences include coding and non-coding sequences, wherein the non-coding sequence contains complementary nucleotides to the coding sequence and thus forms the complement of the coding sequence. A further example of complementary sequences are sense and antisense sequences, wherein the sense sequence contains complementary nucleotides to the antisense sequence and thus forms the complement of the antisense sequence. “Duplex” means at least two oligonucleotides and/or polynucleotides that are fully or partially complementary undergo Watson-Crick type base pairing among all or most of their nucleotides so that a stable complex is formed. In embodiments, a first template polynucleotide and a second template polynucleotide of an overlapping cluster are not substantially complementary (e.g., are at least 50%, 75%, 90%, or more non-complementary to each other).

[0015] As described herein, the complementarity of sequences may be partial, in which only some of the nucleic acids match according to base pairing, or complete, where all the nucleic acids match according to base pairing. Thus, two sequences that are complementary to each other, may have a specified percentage of nucleotides that complement one another (e.g., about 60%, preferably 65%, 70%, 75%, 80%, 85%, 90%, 91%, 92%, 93%, 94%, 95%, 96%, 97%, 98%, 99%, or higher complementarity over a specified region). In embodiments, two sequences are complementary when they are completely complementary, having 100% complementarity. In embodiments, sequences in a pair of complementary sequences form portions of a single polynucleotide with non-base-pairing nucleotides (e.g., as in a hairpin or loop structure, with or without an overhang) or portions of separate polynucleotides. In embodiments, one or both sequences in a pair of complementary sequences form portions of longer polynucleotides, which may or may not include additional regions of complementarity.

[0016] As used herein, the term “contacting” is used in accordance with its plain ordinary meaning and refers to the process of allowing at least two distinct species (e.g. chemical compounds including biomolecules or cells) to become sufficiently proximal to react, interact or physically touch. However, the resulting reaction product can be produced directly from a reaction between the added reagents or from an intermediate from one or more of the added reagents that can be produced in the reaction mixture. The term “contacting” may include allowing two species to react, interact, or physically touch, wherein the two species may be a compound, a protein or enzyme (e.g., a DNA polymerase).

[0017] As may be used herein, the terms “nucleic acid,” “nucleic acid molecule,” “nucleic acid sequence,” “nucleic acid fragment” and “polynucleotide” are used interchangeably and are intended to include, but are not limited to, a polymeric form of nucleotides covalently linked together that may have various lengths, either deoxyribonucleotides or ribonucleotides, or analogs, derivatives or modifications thereof. Different polynucleotides may have different three-dimensional structures, and may perform various functions, known or unknown. Non-limiting examples of polynucleotides include a gene, a gene fragment, an exon, an intron, intergenic DNA (including, without limitation, heterochromatic DNA), messenger RNA (mRNA), transfer RNA, ribosomal RNA, a ribozyme, cDNA, a recombinant polynucleotide, a branched polynucleotide, a plasmid, a vector, isolated DNA of a sequence, isolated RNA of a sequence, a nucleic acid probe, and a primer. Polynucleotides useful in the methods of the disclosure may comprise natural nucleic acid sequences and variants thereof, artificial nucleic acid sequences, or a combination of such sequences. As may be used herein, the terms “nucleic acid oligomer” and “oligonucleotide” are used interchangeably and are intended to include, but are not limited to, nucleic acids having a length of 200 nucleotides or less. In some embodiments, an oligonucleotide is a nucleic acid having a length of 2 to 200 nucleotides, 2 to 150 nucleotides, 5 to 150 nucleotides or 5 to 100 nucleotides. The terms “polynucleotide,” “oligonucleotide,” “oligo” or the like refer, in the usual and customary sense, to a linear sequence of nucleotides. Oligonucleotides are typically from about 5, 6, 7, 8, 9, 10, 12, 15, 25, 30, 40, 50 or more nucleotides in length, up to about 100 nucleotides in length. In some embodiments, an oligonucleotide is a primer configured for extension by a polymerase when the primer is annealed completely or partially to a complementary nucleic acid template. A primer is often a single stranded nucleic acid. In certain embodiments, a primer, or portion thereof, is substantially complementary to a portion of an adapter. In some embodiments, a primer has a length of 200 nucleotides or less. In certain embodiments, a primer has a length of 10 to 150 nucleotides, 15 to 150 nucleotides, 5 to 100 nucleotides, 5 to 50 nucleotides or 10 to 50 nucleotides.

[0018] As used herein, the terms “polynucleotide primer” and “primer” refers to any polynucleotide molecule that may hybridize to a polynucleotide template, be bound by a polymerase, and be extended in a template-directed process for nucleic acid synthesis. The primer may be a separate polynucleotide from the polynucleotide template, or both may be portions of the same polynucleotide (e.g., as in a hairpin structure having a 3′ end that is extended along another portion of the polynucleotide to extend a double-stranded portion of the hairpin). Primers (e.g., forward or reverse primers) may be attached to a solid support. A primer can be of any length depending on the particular technique it will be used for. For example, PCR primers are generally between 10 and 40 nucleotides in length. The length and complexity of the nucleic acid fixed onto the nucleic acid template may vary. In some embodiments, a primer has a length of 200 nucleotides or less. In certain embodiments, a primer has a length of 10 to 150 nucleotides, 15 to 150 nucleotides, 5 to 100 nucleotides, 5 to 50 nucleotides or 10 to 50 nucleotides. One of skill can adjust these factors to provide optimum hybridization and signal production for a given hybridization procedure. The primer permits the addition of a nucleotide residue thereto, or oligonucleotide or polynucleotide synthesis therefrom, under suitable conditions. In an embodiment the primer is a DNA primer, i.e., a primer consisting of, or largely consisting of, deoxyribonucleotide residues. The primers are designed to have a sequence that is the complement of a region of template/target DNA to which the primer hybridizes. The addition of a nucleotide residue to the 3′ end of a primer by formation of a phosphodiester bond results in a DNA extension product. The addition of a nucleotide residue to the 3′ end of the DNA extension product by formation of a phosphodiester bond results in a further DNA extension product. In another embodiment, the primer is an RNA primer. In embodiments, a primer is hybridized to a target polynucleotide. A “primer” is complementary to a polynucleotide template, and complexes by hydrogen bonding or hybridization with the template to give a primer/template complex for initiation of synthesis by a polymerase, which is extended by the addition of covalently bonded bases linked at its 3′ end complementary to the template in the process of DNA synthesis.

[0019] As used herein, the term “primer binding sequence” refers to a polynucleotide sequence that is complementary to at least a portion of a primer (e.g., a sequencing primer or an amplification primer). Primer binding sequences can be of any suitable length. In embodiments, a primer binding sequence is about or at least about 10, 15, 20, 25, 30, or more nucleotides in length. In embodiments, a primer binding sequence is 10-50, 15-30, or 20-25 nucleotides in length. The primer binding sequence may be selected such that the primer (e.g., sequencing primer) has the preferred characteristics to minimize secondary structure formation or minimize non-specific amplification, for example having a length of about 20-30 nucleotides; approximately 50% GC content, and a Tm of about 55° C. to about 65° C.

[0020] Nucleic acids, including e.g., nucleic acids with a phosphorothioate backbone, can include one or more reactive moieties. As used herein, the term reactive moiety includes any group capable of reacting with another molecule, e.g., a nucleic acid or polypeptide through covalent, non-covalent or other interactions. By way of example, the nucleic acid can include an amino acid reactive moiety that reacts with an amino acid on a protein or polypeptide through a covalent, non-covalent or other interaction.

[0021] The term “messenger RNA” or “mRNA” refers to an RNA that is without introns and is capable of being translated into a polypeptide. The term “RNA” refers to any ribonucleic acid, including but not limited to mRNA, tRNA (transfer RNA), rRNA (ribosomal RNA), and/or noncoding RNA (such as lncRNA (long noncoding RNA)). The term “cDNA” refers to a DNA that is complementary or identical to an RNA, in either single stranded or double stranded form.

[0022] A polynucleotide is typically composed of a specific sequence of four nucleotide bases: adenine (A); cytosine (C); guanine (G); and thymine (T) (uracil (U) for thymine (T) when the polynucleotide is RNA). Thus, the term “polynucleotide sequence” is the alphabetical representation of a polynucleotide molecule; alternatively, the term may be applied to the polynucleotide molecule itself. This alphabetical representation can be input into databases in a computer having a central processing unit and used for bioinformatics applications such as functional genomics and homology searching. Polynucleotides may optionally include one or more non-standard nucleotide(s), nucleotide analog(s) and/or modified nucleotides.

[0023] As used herein, the terms “analogue” and “analog”, in reference to a chemical compound, refers to compound having a structure similar to that of another one, but differing from it in respect of one or more different atoms, functional groups, or substructures that are replaced with one or more other atoms, functional groups, or substructures. In the context of a nucleotide, a nucleotide analog refers to a compound that, like the nucleotide of which it is an analog, can be incorporated into a nucleic acid molecule (e.g., an extension product) by a suitable polymerase, for example, a DNA polymerase in the context of a nucleotide analogue. The terms also encompass nucleic acids containing known nucleotide analogs or modified backbone residues or linkages, which are synthetic, naturally occurring, or non-naturally occurring, which have similar binding properties as the reference nucleic acid, and which are metabolized in a manner similar to the reference nucleotides. Examples of such analogs include, include, without limitation, phosphodiester derivatives including, e.g., phosphoramidate, phosphorodiamidate, phosphorothioate (also known as phosphorothioate having double bonded sulfur replacing oxygen in the phosphate), phosphorodithioate, phosphonocarboxylic acids, phosphonocarboxylates, phosphonoacetic acid, phosphonoformic acid, methyl phosphonate, boron phosphonate, or O-methylphosphoroamidite linkages (see, e.g., see Eckstein, OLIGONUCLEOTIDES AND ANALOGUES: A PRACTICAL APPROACH, Oxford University Press) as well as modifications to the nucleotide bases such as in 5-methyl cytidine or pseudouridine; and peptide nucleic acid backbones and linkages. Other analog nucleic acids include those with positive backbones; non-ionic backbones, modified sugars, and non-ribose backbones (e.g. phosphorodiamidate morpholino oligos or locked nucleic acids (LNA)), including those described in U.S. Pat. Nos. 5,235,033 and 5,034,506, and Chapters 6 and 7, ASC Symposium Series 580, CARBOHYDRATE MODIFICATIONS IN ANTISENSE RESEARCH, Sanghui & Cook, eds. Nucleic acids containing one or more carbocyclic sugars are also included within one definition of nucleic acids. Modifications of the ribose-phosphate backbone may be done for a variety of reasons, e.g., to increase the stability and half-life of such molecules in physiological environments or as probes on a biochip. Mixtures of naturally occurring nucleic acids and analogs can be made; alternatively, mixtures of different nucleic acid analogs, and mixtures of naturally occurring nucleic acids and analogs may be made. In embodiments, the internucleotide linkages in DNA are phosphodiester, phosphodiester derivatives, or a combination of both.

[0024] The term “nucleoside” refers, in the usual and customary sense, to a glycosylamine including a nucleobase and a five-carbon sugar (ribose or deoxyribose). Non-limiting examples of nucleosides include cytidine, uridine, adenosine, guanosine, thymidine and inosine. Nucleosides may be modified at the base and/or the sugar. The term “nucleotide” refers, in the usual and customary sense, to a single unit of a polynucleotide, i.e., a monomer. Nucleotides can be ribonucleotides, deoxyribonucleotides, or modified versions thereof. Examples of polynucleotides contemplated herein include single and double stranded DNA, single and double stranded RNA, and hybrid molecules having mixtures of single and double stranded DNA and RNA. Examples of nucleic acid, e.g., polynucleotides contemplated herein include any types of RNA, e.g., mRNA, siRNA, miRNA, and guide RNA and any types of DNA, genomic DNA, plasmid DNA, and minicircle DNA, and any fragments thereof. The term “duplex” in the context of polynucleotides refers, in the usual and customary sense, to double strandedness.

[0025] The terms “identical” or percent “identity,” in the context of two or more nucleic acids or polypeptide sequences, refer to two or more sequences or subsequences that are the same or have a specified percentage of amino acid residues or nucleotides that are the same (i.e., about 60% identity, preferably 65%, 70%, 75%, 80%, 85%, 90%, 91%, 92%, 93%, 94%, 95%, 96%, 97%, 98%, 99%, or higher identity over a specified region, when compared and aligned for maximum correspondence over a comparison window or designated region) as measured using a BLAST or BLAST 2.0 sequence comparison algorithms with default parameters described below, or by manual alignment and visual inspection (see, e.g., NCBI web site http://www.ncbi.nlm.nih.gov/BLAST/or the like). Such sequences are then said to be “substantially identical.” This definition also refers to, or may be applied to, the complement of a test sequence. The definition also includes sequences that have deletions and/or additions, as well as those that have substitutions. As described below, the preferred algorithms can account for gaps and the like. Preferably, identity exists over a region that is at least about 25 amino acids or nucleotides in length, or more preferably over a region that is 50-100 amino acids or nucleotides in length.

[0026] In some embodiments, a nucleic acid (e.g., oligonucleotide probe) includes a molecular identifier or a molecular barcode. As used herein, the term “molecular barcode” (which may be referred to as a “tag”, a “barcode”, an “index” a “molecular identifier”, an “identifier sequence” or a “unique molecular identifier” (UMI)) refers to any material (e.g., a nucleotide sequence, a nucleic acid molecule feature) that is capable of distinguishing an individual molecule in a large heterogeneous population of molecules. In embodiments, a barcode is unique in a pool of barcodes that differ from one another in sequence, or is uniquely associated with a particular sample polynucleotide in a pool of sample polynucleotides. In embodiments, every barcode in a pool of adapters is unique, such that sequencing reads comprising the barcode can be identified as originating from a single sample polynucleotide molecule on the basis of the barcode alone. In other embodiments, individual barcode sequences may be used more than once, but adapters comprising the duplicate barcodes are associated with different sequences and/or in different combinations of barcoded adaptors, such that sequence reads may still be uniquely distinguished as originating from a single sample polynucleotide molecule on the basis of a barcode and adjacent sequence information (e.g., sample polynucleotide sequence, and/or one or more adjacent barcodes). In embodiments, barcodes are about or at least about 5, 6, 7, 8, 9, 10, 15, 20, 25, 30, 40, 50, 75 or more nucleotides in length. In embodiments, barcodes are shorter than 20, 15, 10, 9, 8, 7, 6, or 5 nucleotides in length. In embodiments, barcodes are about 10 to about 50 nucleotides in length, such as about 15 to about 40 or about 20 to about 30 nucleotides in length. In a pool of different barcodes, barcodes may have the same or different lengths. In general, barcodes are of sufficient length and include sequences that are sufficiently different to allow the identification of sequencing reads that originate from the same sample polynucleotide molecule. In embodiments, each barcode in a plurality of barcodes differs from every other barcode in the plurality by at least three nucleotide positions, such as at least 3, 4, 5, 6, 7, 8, 9, 10, or more nucleotide positions. In some embodiments, substantially degenerate barcodes may be known as random. In some embodiments, a barcode may include a nucleic acid sequence from within a pool of known sequences. In some embodiments, the barcodes may be pre-defined. In embodiments, the index includes about 1 to about 10 nucleotides. In embodiments, the index includes about 3, 4, 5, 6, 7, 8, 9, or about 10 nucleotides. In embodiments, the index includes about 3 nucleotides. In embodiments, the index includes about 5 nucleotides. In embodiments, the index includes about 7 nucleotides. In embodiments, the index includes about 10 nucleotides. In embodiments, the index includes about 6 to about 10 nucleotides.

[0027] As used herein, the term “incorporating” or “chemically incorporating,” when used in reference to a primer and cognate nucleotide, refers to the process of joining the cognate nucleotide to the primer or extension product thereof by formation of a phosphodiester bond.

[0028] As used herein, the term “template polynucleotide” or “template nucleic acid” refers to any polynucleotide molecule that may be bound by a polymerase and utilized as a template for nucleic acid synthesis. A template polynucleotide may be a target polynucleotide. In general, the term “target polynucleotide” refers to a nucleic acid molecule or polynucleotide in a starting population of nucleic acid molecules having a target sequence whose presence, amount, and/or nucleotide sequence, or changes in one or more of these, are desired to be determined. The target sequence may be a portion of a gene, a regulatory sequence, genomic DNA, cDNA, RNA including mRNA, miRNA, rRNA, or others. The target sequence may be a target sequence from a sample or a secondary target such as a product of an amplification reaction. A target polynucleotide is not necessarily any single molecule or sequence. For example, a target polynucleotide may be any one of a plurality of target polynucleotides in a reaction, or all polynucleotides in a given reaction, depending on the reaction conditions. For example, in a nucleic acid amplification reaction with random primers, all polynucleotides in a reaction may be amplified. As a further example, a collection of targets may be simultaneously assayed using polynucleotide primers directed to a plurality of targets in a single reaction. As yet another example, all or a subset of polynucleotides in a sample may be modified by the addition of a primer-binding sequence (such as by the ligation of adapters containing the primer binding sequence), rendering each modified polynucleotide a target polynucleotide in a reaction with the corresponding primer polynucleotide(s). In the context of selective sequencing, “target polynucleotide(s)” refers to the subset of polynucleotide(s) to be sequenced from within a starting population of polynucleotides.

[0029] As used herein, the terms “sequencing”, “sequence determination”, “determining a nucleotide sequence”, and the like include determination of a partial or complete sequence information (e.g., a sequence) of a polynucleotide being sequenced, and particularly physical processes for generating such sequence information. That is, the term includes sequence comparisons, consensus sequence determination, contig assembly, fingerprinting, and like levels of information about a target polynucleotide, as well as the express identification and ordering of nucleotides in a target polynucleotide. The term also includes the determination of the identification, ordering, and locations of one, two, or three of the four types of nucleotides within a target polynucleotide. In some embodiments, a sequencing process described herein comprises contacting a template and an annealed primer with a suitable polymerase under conditions suitable for polymerase extension and/or sequencing. The sequencing methods are preferably carried out with the target polynucleotide arrayed on a solid substrate. Multiple target polynucleotides can be immobilized on the solid support through linker molecules, or can be attached to particles, e.g., microspheres, which can also be attached to a solid substrate. In embodiments, the solid substrate is in the form of a chip, a bead, a well, a capillary tube, a slide, a wafer, a filter, a fiber, a porous media, or a column. In embodiments, the solid substrate is gold, quartz, silica, plastic, glass, diamond, silver, metal, or polypropylene. In embodiments, the solid substrate is porous.

[0030] As used herein, the term “substrate” refers to a solid support material. The substrate can be non-porous or porous. The substrate can be rigid or flexible. As used herein, the terms “solid support” and “solid surface” refers to discrete solid or semi-solid surface. A solid support may encompass any type of solid, porous, or hollow sphere, ball, cylinder, or other similar configuration composed of plastic, ceramic, metal, or polymeric material (e.g., hydrogel) onto which a nucleic acid may be immobilized (e.g., covalently or non-covalently). A solid support may comprise a discrete particle that may be spherical (e.g., microspheres) or have a non-spherical or irregular shape, such as cubic, cuboid, pyramidal, cylindrical, conical, oblong, or disc-shaped, and the like. Solid supports in the form of discrete particles may be referred to herein as “beads,” which alone does not imply or require any particular shape. A bead can be non-spherical in shape. A solid support may further comprise a polymer or hydrogel on the surface to which the primers are attached (e.g., the primers are covalently attached to the polymer, wherein the polymer is in direct contact with the solid support). Exemplary solid supports include, but are not limited to, glass and modified or functionalized glass, plastics (including acrylics, polystyrene and copolymers of styrene and other materials, polypropylene, polyethylene, polybutylene, polyurethanes, Teflon™, cyclic olefin copolymers, polyimides etc.), nylon, ceramics, resins, Zeonor, silica or silica-based materials including silicon and modified silicon, carbon, metals, inorganic glasses, optical fiber bundles, photopatternable dry film resists, UV-cured adhesives and polymers. The solid supports for some embodiments have at least one surface located within a flow cell. The solid support, or regions thereof, can be substantially flat. The solid support can have surface features such as wells, pits, channels, ridges, raised regions, pegs, posts or the like. The term solid support is encompassing of a substrate (e.g., a flow cell) having a surface comprising a polymer coating covalently attached thereto. In embodiments, the solid support is a flow cell. The term “flow cell” as used herein refers to a chamber including a solid surface across which one or more fluid reagents can be flowed. Examples of flow cells and related fluidic systems and detection platforms that can be readily used in the methods of the present disclosure are described, for example, in Bentley et al., Nature 456:53-59 (2008). In certain embodiments a substrate comprises a surface (e.g., a surface of a flow cell, a surface of a tube, a surface of a chip), for example a metal surface (e.g. steel, gold, silver, aluminum, silicon and copper). In some embodiments a substrate (e.g., a substrate surface) is coated and/or comprises functional groups and/or inert materials. In certain embodiments a substrate comprises a bead, a chip, a capillary, a plate, a membrane, a wafer (e.g., silicon wafers), a comb, or a pin for example. In some embodiments a substrate comprises a bead and/or a nanoparticle. A substrate can be made of a suitable material, non-limiting examples of which include a plastic or a suitable polymer (e.g., polycarbonate, poly(vinyl alcohol), poly(divinylbenzene), polystyrene, polyamide, polyester, polyvinylidene difluoride (PVDF), polyethylene, polyurethane, polypropylene, and the like), borosilicate, glass, nylon, Wang resin, Merrifield resin, metal (e.g., iron, a metal alloy, sepharose, agarose, polyacrylamide, dextran, cellulose and the like or combinations thereof. In some embodiments a substrate comprises a magnetic material (e.g., iron, nickel, cobalt, platinum, aluminum, and the like).

[0031] As used herein, the term “sequencing cycle” is used in accordance with its plain and ordinary meaning and refers to incorporating one or more nucleotides (e.g., nucleotide analogues) to the 3′ end of a polynucleotide with a polymerase, and detecting one or more labels that identify the one or more nucleotides incorporated. In embodiments, one nucleotide (e.g., a modified nucleotide) is incorporated per sequencing cycle. The sequencing may be accomplished by, for example, sequencing by synthesis, pyrosequencing, and the like. In embodiments, a sequencing cycle includes extending a complementary polynucleotide by incorporating a first nucleotide using a polymerase, wherein the polynucleotide is hybridized to a template nucleic acid, detecting the first nucleotide, and identifying the first nucleotide. In embodiments, to begin a sequencing cycle, one or more differently labeled nucleotides and a DNA polymerase can be introduced. Following nucleotide addition, signals produced (e.g., via excitation and emission of a detectable label) can be detected to determine the identity of the incorporated nucleotide (based on the labels on the nucleotides). Reagents can then be added to remove the 3′ reversible terminator and to remove labels from each incorporated base. Reagents, enzymes, and other substances can be removed between steps by washing. Cycles may include repeating these steps, and the sequence of each cluster is read over the multiple repetitions. In embodiments, a sequencing cycle incorporates one modified nucleotide into a primer hybridized to a template.

[0032] As used herein, the term “extension” or “elongation” is used in accordance with their plain and ordinary meanings and refer to synthesis by a polymerase of a new polynucleotide strand complementary to a template strand by adding free nucleotides (e.g., dNTPs) from a reaction mixture that are complementary to the template in the 5′-to-3′ direction. Extension includes condensing the 5′-phosphate group of the dNTPs with the 3′-hydroxy group at the end of the nascent (elongating) DNA strand.

[0033] As used herein, the term “sequencing read” is used in accordance with its plain and ordinary meaning and refers to an inferred sequence of nucleotide bases (or nucleotide base probabilities) corresponding to all or part of a single polynucleotide fragment. A sequencing read may include 1, 2, 5, 10, 20, 30, 40, 50, 60, 70, 80, 90, 100, 150, 200, 250, or more nucleotide bases. In embodiments, a sequencing read includes reading a barcode sequence and a template nucleotide sequence. In embodiments, a sequencing read includes reading a template nucleotide sequence. In embodiments, a sequencing read includes reading a barcode and not a template nucleotide sequence. Reads of length 20-40 base pairs (bp) are referred to as ultra-short. Typical sequencers produce read lengths in the range of 100-500 bp. Read length is a factor which can affect the results of biological studies. For example, longer read lengths improve the resolution of de novo genome assembly and detection of structural variants. In embodiments, a sequencing read includes reading a barcode and a template nucleotide sequence. In embodiments, a sequencing read includes reading a template nucleotide sequence. In embodiments, a sequencing read includes reading a barcode and not a template nucleotide sequence. In embodiments, a sequencing read includes a computationally derived string corresponding to the detected label. In some embodiments, a sequencing read may include 300, 400, 500, 600, 700, 800, 900, 1,000, 1,100, 1,200, 1,300, 1,400, 1,500, or more nucleotide bases.

[0034] Complementary single stranded nucleic acids and/or substantially complementary single stranded nucleic acids can hybridize to each other under hybridization conditions, thereby forming a nucleic acid that is partially or fully double stranded. All or a portion of a nucleic acid sequence may be substantially complementary to another nucleic acid sequence, in some embodiments. As referred to herein, “substantially complementary” refers to nucleotide sequences that can hybridize with each other under suitable hybridization conditions. Hybridization conditions can be altered to tolerate varying amounts of sequence mismatch within complementary nucleic acids that are substantially complementary. Substantially complementary portions of nucleic acids that can hybridize to each other can be 75% or more, 76% or more, 77% or more, 78% or more, 79% or more, 80% or more, 81% or more, 82% or more, 83% or more, 84% or more, 85% or more, 86% or more, 87% or more, 88% or more, 89% or more, 90% or more, 91% or more, 92% or more, 93% or more, 94% or more, 95% or more, 96% or more, 97% or more, 98% or more or 99% or more complementary to each other. In some embodiments substantially complementary portions of nucleic acids that can hybridize to each other are 100% complementary. Nucleic acids, or portions thereof, that are configured to hybridize to each other often comprise nucleic acid sequences that are substantially complementary to each other.

[0035] “Hybridize” shall mean the annealing of a nucleic acid sequence to another nucleic acid sequence (e.g., one single-stranded nucleic acid (such as a primer) to another nucleic acid) based on the well-understood principle of sequence complementarity. In an embodiment the other nucleic acid is a single-stranded nucleic acid. In some embodiments, one portion of a nucleic acid hybridizes to itself, such as in the formation of a hairpin structure. The propensity for hybridization between nucleic acids depends on the temperature and ionic strength of their milieu, the length of the nucleic acids and the degree of complementarity. The effect of these parameters on hybridization is described in, for example, Sambrook J., Fritsch E. F., Maniatis T., Molecular cloning: a laboratory manual, Cold Spring Harbor Laboratory Press, New York (1989). As used herein, hybridization of a primer, or of a DNA extension product, respectively, is extendable by creation of a phosphodiester bond with an available nucleotide or nucleotide analogue capable of forming a phosphodiester bond, therewith. For example, hybridization can be performed at a temperature ranging from 15° C. to 95° C. In some embodiments, the hybridization is performed at a temperature of about 20° C., about 25° C., about 30° C., about 35° C., about 40° C., about 45° C., about 50° C., about 55° C., about 60° C., about 65° C., about 70° C., about 75° C., about 80° C., about 85° C., about 90° C., or about 95° C. In other embodiments, the stringency of the hybridization can be further altered by the addition or removal of components of the buffered solution. In some embodiments nucleic acids, or portions thereof, that are configured to specifically hybridize are often about 80% or more, 81% or more, 82% or more, 83% or more, 84% or more, 85% or more, 86% or more, 87% or more, 88% or more, 89% or more, 90% or more, 91% or more, 92% or more, 93% or more, 94% or more, 95% or more, 96% or more, 97% or more, 98% or more, 99% or more or 100% complementary to each other over a contiguous portion of nucleic acid sequence.

[0036] As used herein, “specifically hybridizes” refers to preferential hybridization under hybridization conditions where two nucleic acids, or portions thereof, that are substantially complementary, hybridize to each other and not to other nucleic acids that are not substantially complementary to either of the two nucleic acid. For example, specific hybridization includes the hybridization of a primer or capture nucleic acid to a portion of a target nucleic acid (e.g., a template, or adapter portion of a template) that is substantially complementary to the primer or capture nucleic acid. In some embodiments nucleic acids, or portions thereof, that are configured to specifically hybridize are often about 80% or more, 81% or more, 82% or more, 83% or more, 84% or more, 85% or more, 86% or more, 87% or more, 88% or more, 89% or more, 90% or more, 91% or more, 92% or more, 93% or more, 94% or more, 95% or more, 96% or more, 97% or more, 98% or more, 99% or more or 100% complementary to each other over a contiguous portion of nucleic acid sequence. A specific hybridization discriminates over non-specific hybridization interactions (e.g., two nucleic acids that a not configured to specifically hybridize, e.g., two nucleic acids that are 80% or less, 70% or less, 60% or less or 50% or less complementary) by about 2-fold or more, often about 10-fold or more, and sometimes about 100-fold or more, 1000-fold or more, 10,000-fold or more, 100,000-fold or more, or 1,000,000-fold or more. Two nucleic acid strands that are hybridized to each other can form a duplex, which comprises a double stranded portion of nucleic acid.

[0037] As used herein, the term “adjacent,” refers to two nucleotide sequences in a nucleic acid, can refer to nucleotide sequences separated by 0 to about 20 nucleotides, more specifically, in a range of about 1 to about 10 nucleotides, or to sequences that directly abut one another. As those of skill in the art appreciate, two nucleotide sequences that that are to ligated together will generally directly abut one another.

[0038] A nucleic acid can be amplified by any suitable method. The term “amplified” as used herein refers to subjecting a target nucleic acid in a sample to a process that linearly or exponentially generates amplicon nucleic acids having the same or substantially the same (e.g., substantially identical) nucleotide sequence as the target nucleic acid, or segment thereof, and/or a complement thereof. In some embodiments an amplification reaction comprises a suitable thermal stable polymerase. Thermal stable polymerases are known in the art and are stable for prolonged periods of time, at temperature greater than 80° C. when compared to common polymerases found in most mammals. In certain embodiments the term “amplified” refers to a method that comprises a polymerase chain reaction (PCR). Conditions conducive to amplification (i.e., amplification conditions) are well known and often comprise at least a suitable polymerase, a suitable template, a suitable primer or set of primers, suitable nucleotides (e.g., dNTPs), a suitable buffer, and application of suitable annealing, hybridization and/or extension times and temperatures. In certain embodiments an amplified product (e.g., an amplicon) can contain one or more additional and/or different nucleotides than the template sequence, or portion thereof, from which the amplicon was generated (e.g., a primer can contain “extra” nucleotides (such as a 5′ portion that does not hybridize to the template), or one or more mismatched bases within a hybridizing portion of the primer).

[0039] As used herein, the term “rolling circle amplification (RCA)” refers to a nucleic acid amplification reaction that amplifies a circular nucleic acid template (e.g., single-stranded DNA circles) via a rolling circle mechanism. Rolling circle amplification reaction is initiated by the hybridization of a primer to a circular, often single-stranded, nucleic acid template. The nucleic acid polymerase then extends the primer that is hybridized to the circular nucleic acid template by continuously progressing around the circular nucleic acid template to replicate the sequence of the nucleic acid template over and over again (rolling circle mechanism). The rolling circle amplification typically produces concatemers comprising tandem repeat units of the circular nucleic acid template sequence. The rolling circle amplification may be a linear RCA (LRCA), exhibiting linear amplification kinetics (e.g., RCA using a single specific primer), or may be an exponential RCA (ERCA) exhibiting exponential amplification kinetics. Rolling circle amplification may also be performed using multiple primers (multiply primed rolling circle amplification or MPRCA) leading to hyper-branched concatemers. For example, in a double-primed RCA, one primer may be complementary, as in the linear RCA, to the circular nucleic acid template, whereas the other may be complementary to the tandem repeat unit nucleic acid sequences of the RCA product. Consequently, the double-primed RCA may proceed as a chain reaction with exponential (geometric) amplification kinetics featuring a ramifying cascade of multiple-hybridization, primer-extension, and strand-displacement events involving both the primers. This often generates a discrete set of concatemeric, double-stranded nucleic acid amplification products. The rolling circle amplification may be performed in-vitro under isothermal conditions using a suitable nucleic acid polymerase such as Phi29 DNA polymerase. RCA may be performed by using any of the DNA polymerases that are known in the art (e.g., a Phi29 DNA polymerase, a Bst DNA polymerase, or SD polymerase).

[0040] A nucleic acid can be amplified by a thermocycling method or by an isothermal amplification method. In some embodiments, a rolling circle amplification method is used. In some embodiments amplification takes place on a solid support (e.g., within a flow cell) where a nucleic acid, nucleic acid library or portion thereof is immobilized. In certain sequencing methods, a nucleic acid library is added to a flow cell and immobilized by hybridization to anchors under suitable conditions. This type of nucleic acid amplification is often referred to as solid phase amplification. In some embodiments of solid phase amplification, all or a portion of the amplified products are synthesized by an extension initiating from an immobilized primer. Solid phase amplification reactions are analogous to standard solution phase amplifications except that at least one of the amplification oligonucleotides (e.g., primers) is immobilized on a solid support.

[0041] In some embodiments, solid phase amplification comprises a nucleic acid amplification reaction comprising only one species of oligonucleotide primer immobilized to a surface or substrate. In certain embodiments solid phase amplification comprises a plurality of different immobilized oligonucleotide primer species. In some embodiments solid phase amplification may comprise a nucleic acid amplification reaction comprising one species of oligonucleotide primer immobilized on a solid surface and a second different oligonucleotide primer species in solution. Multiple different species of immobilized or solution based primers can be used.

[0042] As used herein, the term “DNA polymerase” and “nucleic acid polymerase” are used in accordance with their plain ordinary meanings and refer to enzymes capable of synthesizing nucleic acid molecules from nucleotides (e.g., deoxyribonucleotides). Typically, a DNA polymerase adds nucleotides to the 3′-end of a DNA strand, one nucleotide at a time. In embodiments, the DNA polymerase is a Pol I DNA polymerase, Pol II DNA polymerase, Pol III DNA polymerase, Pol IV DNA polymerase, Pol V DNA polymerase, Pol β DNA polymerase, Pol μ DNA polymerase, Pol λ DNA polymerase, Pol σ DNA polymerase, Pol α DNA polymerase, Pol δ DNA polymerase, Pol ε DNA polymerase, Pol η DNA polymerase, Pol ι DNA polymerase, Pol κ DNA polymerase, Pol ζ DNA polymerase, Pol γ DNA polymerase, Pol θ DNA polymerase, Pol ν DNA polymerase, or a thermophilic nucleic acid polymerase (e.g. Therminator γ, 9° N polymerase (exo-), Therminator II, Therminator III, or Therminator IX). In embodiments, the DNA polymerase is a modified archaeal DNA polymerase. In embodiments, the polymerase is a reverse transcriptase. In embodiments, the polymerase is a mutant P. abyssi polymerase (e.g., such as a mutant P. abyssi polymerase described in WO 2018/148723 or WO 2020/056044).

[0043] As used herein, the term “kit” refers to any delivery system for delivering materials. In the context of reaction assays, such delivery systems include systems that allow for the storage, transport, or delivery of reaction reagents (e.g., oligonucleotides, enzymes, etc. in the appropriate containers) and/or supporting materials (e.g., packaging, buffers, written instructions for performing a method, etc.) from one location to another. For example, kits include one or more enclosures (e.g., boxes) containing the relevant reaction reagents and/or supporting materials. As used herein, the term “fragmented kit” refers to a delivery system comprising two or more separate containers that each contain a subportion of the total kit components. The containers may be delivered to the intended recipient together or separately. For example, a first container may contain an enzyme for use in an assay, while a second container contains oligonucleotides. In contrast, a “combined kit” refers to a delivery system containing all of the components of a reaction assay in a single container (e.g., in a single box housing each of the desired components). The term “kit” includes both fragmented and combined kits.

[0044] The term “nucleobase” or “base” as used herein refers to a purine or pyrimidine compound, or a derivative thereof, that may be a constituent of nucleic acid (i.e., DNA or RNA, or a derivative thereof). In embodiments, the nucleobase is a divalent purine or pyrimidine, or derivative thereof. In embodiments, the nucleobase is a monovalent purine or pyrimidine, or derivative thereof. In embodiments, the base is a derivative of a naturally occurring DNA or RNA base (e.g., a base analogue). In embodiments, the base is a hybridizing base. In embodiments, the base hybridizes to a complementary base. In embodiments, the base is capable of forming at least one hydrogen bond with a complementary base (e.g., adenine hydrogen bonds with thymine, adenine hydrogen bonds with uracil, guanine pairs with cytosine). Non-limiting examples of a base includes cytosine or a derivative thereof (e.g., cytosine analogue), guanine or a derivative thereof (e.g., guanine analogue), adenine or a derivative thereof (e.g., adenine analogue), thymine or a derivative thereof (e.g., thymine analogue), uracil or a derivative thereof (e.g., uracil analogue), hypoxanthine or a derivative thereof (e.g., hypoxanthine analogue), xanthine or a derivative thereof (e.g., xanthine analogue), 7-methylguanine or a derivative thereof (e.g., 7-methylguanine analogue), deaza-adenine or a derivative thereof (e.g., deaza-adenine analogue), deaza-guanine or a derivative thereof (e.g., deaza-guanine), deaza-hypoxanthine or a derivative thereof, 5,6-dihydrouracil or a derivative thereof (e.g., 5,6-dihydrouracil analogue), 5-methylcytosine or a derivative thereof (e.g., 5-methylcytosine analogue), or 5-hydroxymethylcytosine or a derivative thereof (e.g., 5-hydroxymethylcytosine analogue) moieties. In embodiments, the base is adenine, guanine, uracil, cytosine, thymine, hypoxanthine, xanthine, theobromine, caffeine, uric acid, or isoguanine, which may be optionally substituted or modified. In embodiments, the base is adenine, guanine, hypoxanthine, xanthine, theobromine, caffeine, uric acid, or isoguanine, which may be optionally substituted or modified.

[0045] “Synthetic” agents refer to non-naturally occurring agents, such as enzymes or nucleotides. The term “synthetic sequence” as used herein refers to a modified nucleic acid sequence such as those constructed by synthetic methods. In embodiments, a synthetic sequence is artificial or engineered, or derived from or contains an artificial or engineered nucleic acid content (e.g., non-natural or not wild type). For example, a polynucleotide sequence that is inserted or ligated to a target sequence (e.g., genomic DNA) may be referred to as a synthetic sequence. A polynucleotide adapter, as used herein, may be considered as providing a synthetic sequence.

[0046] Where a range of values is provided, it is understood that each intervening value, to the tenth of the unit of the lower limit unless the context clearly indicates otherwise, between the upper and lower limit of that range, and any other stated or unstated intervening value in, or smaller range of values within, that stated range is encompassed within the invention. The upper and lower limits of any such smaller range (within a more broadly recited range) may independently be included in the smaller ranges, or as particular values themselves, and are also encompassed within the invention, subject to any specifically excluded limit in the stated range. Where the stated range includes one or both of the limits, ranges excluding either or both of those included limits are also included in the invention.

[0047] The term “multiplexing” as used herein refers to an analytical method in which the presence and/or amount of multiple targets, e.g., multiple nucleic acid target sequences, can be assayed simultaneously by using the methods and devices as described herein, each of which has at least one different detection characteristic, e.g., fluorescence characteristic (e.g., excitation wavelength, emission wavelength, emission intensity, FWHM (full width at half maximum peak height), or fluorescence lifetime) or a unique nucleic acid sequence characteristic.

[0048] As used herein, “capable of hybridizing” is used in accordance with its ordinary meaning in the art and refers to two oligonucleotides that, under suitable conditions, can form a duplex (e.g., Watson-Crick pairing) which includes a double-stranded portion of nucleic acid. Such conditions, known in the art and described herein, depend upon, for example, the nature of the nucleotide sequence, temperature, and buffer conditions. The stringency of hybridization can be influenced by various parameters, including degree of identity and/or complementarity between the polynucleotides (or any target sequences within the polynucleotides) to be hybridized; melting point of the polynucleotides and/or target sequences to be hybridized, referred to as “Tm”; parameters such as salts, buffers, pH, temperature, GC % content of the polynucleotide and primers, and/or time. Typically, hybridization is favored in lower temperatures and/or increased salt concentrations, as well as reduced concentrations of organic solvents. Some exemplary conditions suitable for hybridization include incubation of the polynucleotides to be hybridized in solutions having sodium salts, such as NaCl, sodium citrate and/or sodium phosphate. In some embodiments, hybridization or wash solutions can include about 10-75% formamide and/or about 0.01-0.7% sodium dodecyl sulfate (SDS). In some embodiments, a hybridization solution can be a stringent hybridization solution which can include any combination of 50% formamide, 5×SSC (0.75 M NaCl, 0.075 M sodium citrate), 50 mM sodium phosphate (pH 6.8), 0.1% sodium pyrophosphate, 5×Denhardt's solution, 0.1% SDS, and/or 10% dextran sulfate. In embodiments, the hybridization or washing solution can include BSA (bovine serum albumin). In embodiments, hybridization or washing can be conducted at a temperature range of about 20-25° C., or about 25-30° C., or about 30-35° C., or about 35-40° C., or about 40-45° C., or about 45-50° C., or about 50-55° C., or higher. In embodiments, hybridization or washing can be conducted for a time range of about 1-10 minutes, or about 10-20 minutes, or about 20-30 minutes, or about 30-40 minutes, or about 40-50 minutes, or about 50-60 minutes, or longer. In some embodiments, hybridization or wash conditions can be conducted at a pH range of about 5-10, or about pH 6-9, or about pH 6.5-8, or about pH 6.5-7.

[0049] As used herein, the terms “reversible blocking groups” and “reversible terminators” are used in accordance with their plain and ordinary meanings and refer to a blocking moiety located, for example, at the 3′ position of the nucleotide and may be a chemically cleavable moiety such as an allyl group, an azidomethyl group or a methoxymethyl group, or may be an enzymatically cleavable group such as a phosphate ester. Non-limiting examples of nucleotide blocking moieties are described in applications WO 2004/018497, U.S. Pat. Nos. 7,057,026, 7,541,444, WO 96/07669, U.S. Pat. Nos. 5,763,594, 5,808,045, 5,872,244 and 6,232,465 the contents of which are incorporated herein by reference in their entirety. The nucleotides may be labelled or unlabeled. They may be modified with reversible terminators useful in methods provided herein and may be 3′-O-blocked reversible or 3′-unblocked reversible terminators. In nucleotides with 3′-O-blocked reversible terminators, the blocking group —OR [reversible terminating (capping) group] is linked to the oxygen atom of the 3′-OH of the pentose, while the label is linked to the base, which acts as a reporter and can be cleaved. The 3′-O-blocked reversible terminators are known in the art, and may be, for instance, a 3′-ONH₂ reversible terminator, a 3′-O-allyl reversible terminator, or a 3′-O-azidomethyl reversible terminator. In embodiments, the reversible terminator moiety is attached to the 3′-oxygen of the nucleotide, having the formula,

[chemical structure]

wherein the 3′ oxygen of the nucleotide is not shown in the formulae above. The term “allyl” as described herein refers to an unsubstituted methylene attached to a vinyl group (i.e., —CH═CH₂), e.g.,

[chemical structure]

In embodiments, the reversible terminator moiety is

[chemical structure]

as described in U.S. Pat. No. 10,738,072, which is incorporated herein by reference for all purposes. For example, a nucleotide including a reversible terminator moiety may be represented by the formula:

[chemical structure]

where the nucleobase is adenine or adenine analogue, thymine or thymine analogue, guanine or guanine analogue, or cytosine or cytosine analogue.

[0050] The term “cellular component” is used in accordance with its ordinary meaning in the art and refers to any organelle, nucleic acid, protein, or analyte that is found in a prokaryotic, eukaryotic, archaeal, or other organismic cell type. Examples of cellular components (e.g., a component of a cell) include RNA transcripts, proteins, membranes, lipids, and other analytes.

[0051] A “gene” refers to a polynucleotide that is capable of conferring biological function after being transcribed and/or translated.

[0052] As used herein, the terms “biomolecule” or “analyte” refer to an agent (e.g., a compound, macromolecule, or small molecule), and the like derived from a biological system (e.g., an organism, a cell, or a tissue). The biomolecule may contain multiple individual components that collectively construct the biomolecule, for example, in embodiments, the biomolecule is a polynucleotide wherein the polynucleotide is composed of nucleotide monomers. The biomolecule may be or may include DNA, RNA, organelles, carbohydrates, lipids, proteins, or any combination thereof. These components may be extracellular. In some examples, the biomolecule may be referred to as a clump or aggregate of combinations of components. In some instances, the biomolecule may include one or more constituents of a cell but may not include other constituents of the cell. In embodiments, a biomolecule is a molecule produced by a biological system (e.g., an organism). The biomolecule may be any substance (e.g. molecule) or entity that is desired to be detected by the method of the invention. The biomolecule is the “target” of the assay method of the invention. The biomolecule may accordingly be any compound that may be desired to be detected, for example a peptide or protein, or nucleic acid molecule or a small molecule, including organic and inorganic molecules. The biomolecule may be a cell or a microorganism, including a virus, or a fragment or product thereof. Biomolecules of particular interest may thus include proteinaceous molecules such as peptides, polypeptides, proteins or prions or any molecule which includes a protein or polypeptide component, etc., or fragments thereof. The biomolecule may be a single molecule or a complex that contains two or more molecular subunits, which may or may not be covalently bound to one another, and which may be the same or different. Thus, in addition to cells or microorganisms, such a complex biomolecule may also be a protein complex. Such a complex may thus be a homo- or hetero-multimer. Aggregates of molecules e.g., proteins may also be target analytes, for example aggregates of the same protein or different proteins. The biomolecule may also be a complex between proteins or peptides and nucleic acid molecules such as DNA or RNA. Of particular interest may be the interactions between proteins and nucleic acids, e.g., regulatory factors, such as transcription factors, and interactions between DNA or RNA molecules.

[0053] The term “sequencing device” and the like means an integrated system of one or more chambers, ports, and channels that are interconnected and in fluid communication and designed for carrying out an analytical reaction or process, either alone or in cooperation with an appliance or instrument that provides support functions, such as sample introduction, fluid and/or reagent driving means, temperature control, detection systems, data collection and/or integration systems, for the purpose of determining the nucleic acid sequence of a template polynucleotide. Nucleic acid sequencing devices may further include valves, pumps, and specialized functional coatings on interior walls. Nucleic acid sequencing devices may include a receiving unit, or platen, that orients the flow cell such that a maximal surface area of the flow cell is available to be exposed to an optical lens. Other nucleic acid sequencing devices include those provided by Singular Genomics™ (e.g., the G4X™ system). Nucleic acid sequencing devices may further include fluidic reservoirs (e.g., bottles), valves, pressure sources, pumps, sensors, control systems, valves, pumps, and specialized functional coatings on interior walls. In embodiments, the device includes a plurality of a sequencing reagent reservoirs and a plurality of clustering reagent reservoirs. In embodiments, the clustering reagent reservoir includes amplification reagents (e.g., an aqueous buffer containing enzymes, salts, and nucleotides, denaturants, crowding agents, etc.) In embodiments, the reservoirs include sequencing reagents (such as an aqueous buffer containing enzymes, salts, and nucleotides); a wash solution (an aqueous buffer); a cleave solution (an aqueous buffer containing a cleaving agent, such as a reducing agent); or a cleaning solution (a dilute bleach solution, dilute NaOH solution, dilute HCl solution, dilute antibacterial solution, or water). The fluid of each of the reservoirs can vary. The fluid can be, for example, an aqueous solution which may contain buffers (e.g., saline-sodium citrate (SSC), ascorbic acid, tris(hydroxymethyl)aminomethane or “Tris”), aqueous salts (e.g., KCl or (NH4)2SO4)), nucleotides, polymerases, cleaving agent (e.g., tri-n-butyl-phosphine, triphenyl phosphine and its sulfonated versions (i.e., tris(3-sulfophenyl)-phosphine, TPPTS), and tri(carboxyethyl)phosphine (TCEP) and its salts, cleaving agent scavenger compounds (e.g., 2′-Dithiobisethanamine or 11-Azido-3,6,9-trioxaundecane-1-amine), chelating agents (e.g., EDTA), detergents, surfactants, crowding agents, or stabilizers (e.g., PEG, Tween, BSA). Non-limited examples of reservoirs include cartridges, pouches, vials, containers, and eppendorf tubes. In embodiments, the device is configured to perform fluorescent imaging. In embodiments, the device includes one or more light sources (e.g., one or more lasers). In embodiments, the illuminator or light source is a radiation source (i.e., an origin or generator of propagated electromagnetic energy) providing incident light to the sample. A radiation source can include an illumination source producing electromagnetic radiation in the ultraviolet (UV) range (about 200 to 390 nm), visible (VIS) range (about 390 to 770 nm), or infrared (IR) range (about 0.77 to 25 microns), or other range of the electromagnetic spectrum. In embodiments, the illuminator or light source is a lamp such as an arc lamp or quartz halogen lamp. In embodiments, the illuminator or light source is a coherent light source. In embodiments, the light source is a laser, LED (light emitting diode), a mercury or tungsten lamp, or a super-continuous diode. In embodiments, the light source provides excitation beams having a wavelength between 200 nm to 1500 nm. In embodiments, the laser provides excitation beams having a wavelength of 405 nm, 470 nm, 488 nm, 514 nm, 520 nm, 532 nm, 561 nm, 633 nm, 639 nm, 640 nm, 800 nm, 808 nm, 912 nm, 1024 nm, or 1500 nm. In embodiments, the illuminator or light source is a light-emitting diode (LED). The LED can be, for example, an Organic Light Emitting Diode (OLED), a Thin Film Electroluminescent Device (TFELD), or a Quantum dot based inorganic organic LED. The LED can include a phosphorescent OLED (PHOLED). In embodiments, the nucleic acid sequencing device includes an imaging system (e.g., an imaging system as described herein). The imaging system capable of exciting one or more of the identifiable labels (e.g., a fluorescent label) linked to a nucleotide and thereafter obtain image data for the identifiable labels. The image data (e.g., detection data) may be analyzed by another component within the device. The imaging system may include a system described herein and may include a fluorescence spectrophotometer including an objective lens and/or a solid-state imaging device. The solid-state imaging device may include a charge coupled device (CCD) and/or a complementary metal oxide semiconductor (CMOS). The system may also include circuitry and processors, including systems using microcontrollers, reduced instruction set computers (RISC), application specific integrated circuits (ASICs), field programmable gate array (FPGAs), logic circuits, and any other circuit or processor capable of executing functions described herein. The set of instructions may be in the form of a software program. As used herein, the terms “software” and “firmware” are interchangeable, and include any computer program stored in memory for execution by a computer, including RAM memory, ROM memory, EPROM memory, EEPROM memory, and non-volatile RAM (NVRAM) memory. In embodiments, the device includes a thermal control assembly useful to control the temperature of the reagents.

[0054] The term “image” is used according to its ordinary meaning and refers to a representation of all or part of an object. The representation may be an optically detected reproduction. For example, an image can be obtained from fluorescent, luminescent, scatter, or absorption signals. The part of the object that is present in an image can be the surface or other xy plane of the object. Typically, an image is a 2 dimensional representation of a 3 dimensional object. An image may include signals at differing intensities (i.e., signal levels). An image can be provided in a computer readable format or medium. An image is derived from the collection of focus points of light rays coming from an object (e.g., the sample), which may be detected by any image sensor.

[0055] As used herein, the term “signal” is intended to include, for example, fluorescent, luminescent, scatter, or absorption impulse or electromagnetic wave transmitted or received. Signals can be detected in the ultraviolet (UV) range (about 200 to 390 nm), visible (VIS) range (about 391 to 770 nm), infrared (IR) range (about 0.771 to 25 microns), or other range of the electromagnetic spectrum. The term “signal level” refers to an amount or quantity of detected energy or coded information. For example, a signal may be quantified by its intensity, wavelength, energy, frequency, power, luminance, or a combination thereof. Other signals can be quantified according to characteristics such as voltage, current, electric field strength, magnetic field strength, frequency, power, temperature, etc. Absence of signal is understood to be a signal level of zero or a signal level that is not meaningfully distinguished from noise.

[0056] The term “xy coordinates” refers to information that specifies location, size, shape, and/or orientation in an xy plane. The information can be, for example, numerical coordinates in a Cartesian system. The coordinates can be provided relative to one or both of the x and y axes or can be provided relative to another location in the xy plane (e.g., a fiducial). The term “xy plane” refers to a 2 dimensional area defined by straight line axes x and y. When used in reference to a detecting apparatus and an object observed by the detector, the xy plane may be specified as being orthogonal to the direction of observation between the detector and object being detected.

[0057] As used herein, the term “tissue section” refers to a piece of tissue that has been obtained from a subject, optionally fixed and attached to a surface, e.g., a microscope slide or solid support as described herein.

[0058] As used herein, the term “kit” refers to any delivery system for delivering materials. In the context of reaction assays, such delivery systems include systems that allow for the storage, transport, or delivery of reaction reagents (e.g., oligonucleotides, enzymes, etc. in the appropriate containers) and/or supporting materials (e.g., packaging, buffers, written instructions for performing a method, etc.) from one location to another. For example, kits include one or more enclosures (e.g., boxes) containing the relevant reaction reagents and/or supporting materials. As used herein, the term “fragmented kit” refers to a delivery system including two or more separate containers that each contain a subportion of the total kit components. The containers may be delivered to the intended recipient together or separately. For example, a first container may contain an enzyme for use in an assay, while a second container contains oligonucleotides. In contrast, a “combined kit” refers to a delivery system containing all of the components of a reaction assay in a single container (e.g., in a single box housing each of the desired components). The term “kit” includes both fragmented and combined kits.

[0059] As used herein the term “determine” can be used to refer to the act of ascertaining, establishing or estimating. A determination can be probabilistic. For example, a determination can have an apparent likelihood of at least 50%, 75%, 90%, 95%, 98%, 99%, 99.9% or higher. In some cases, a determination can have an apparent likelihood of 100%. An exemplary determination is a maximum likelihood analysis or report. As used herein, the term “identify,” when used in reference to a thing, can be used to refer to recognition of the thing, distinction of the thing from at least one other thing or categorization of the thing with at least one other thing. The recognition, distinction or categorization can be probabilistic. For example, a thing can be identified with an apparent likelihood of at least 50%, 75%, 90%, 95%, 98%, 99%, 99.9% or higher. A thing can be identified based on a result of a maximum likelihood analysis. In some cases, a thing can be identified with an apparent likelihood of 100%.

[0060] The term “organelle” as used herein refers to an entity of cell associated with a particular function. In embodiments, an organelle refers to a specialized subunit within a cell that has a specific function, and is usually separately enclosed within its own lipid bilayer. Examples of organelles include the nucleus, mitochondria, endoplasmic reticulum, Golgi apparatus, lysosomes, and chloroplasts (in plant cells). Although most organelles are functional units within cells, some organelles function extend outside of cells, such as cilia, flagellum, archaellum, and the trichocyst. In embodiments, the organelle is a membrane bound organelle. In embodiments, the organelle is a non-membrane bound organelle. Non-membrane bounded organelles, also called biomolecular complexes, are assemblies of macromolecules such as the ribosome, the spliceosome, the proteasome, the nucleosome, and the centriole. Commonly detected organelles includes the nucleus, which is often visualized using dyes such as DAPI, Hoechst, and SYTO™ Green, mitochondria are with MitoTracker™ dyes and Rhodamine 123, endoplasmic reticulum (ER) utilizing dyes like ER-Tracker® Green/Red or DiOC6, the Golgi apparatus is stained with BODIPY™ FL C5-Ceramide and NBD C6-Ceramide, lysosomes are typically stained using LysoTracker™ dyes and Acridine Orange, and peroxisomes may be stained with Peroxisome-Tracker® Red and Peroxy Green dyes. Although not membrane-bound, ribosomes may detected using antibodies such as anti-RPL10 or anti-RPS6. Additionally, the cytoskeleton, specifically actin filaments, is frequently stained to study cell shape with Phalloidin conjugates and Alexa Fluor® Phalloidin being widely used. In embodiments, the organelle is a biomolecular complex including a plurality of subunits. In embodiments, the organelle is a macromolecule. In embodiments, the organelle is a eukaryotic organelle. In embodiments, the organelle is the cell membrane, the endoplasmic reticulum, a flagellum, a Golgi apparatus, a mitochondria, the nucleus, a vacuole. In embodiments, the organelle is a lysosome. In embodiments, the organelle is the nucleolus.

[0061] As used herein, the term “predicted melting temperature” or “melting temperature” or “Tm” refers to a computationally estimated temperature at which 50% of an oligonucleotide is expected to dissociate from its complementary strand under hybridization conditions (e.g., oligonucleotide concentration, ionic strength (e.g., sodium or magnesium ion concentration), pH, and/or solvent environment). The predicted melting temperature is calculated using thermodynamic models that account for sequence-specific hybridization stability, including base pairing and nearest-neighbor stacking interactions.

[0062] As used herein, the term “weak base” refers to refers to adenine (A) and thymine (T) bases as these nitrogenous bases form two hydrogen bond pairs and thus weaker bonds compared to the guanine (G) or cytosine (C) bases pairs.

[0063] As used herein, the term “strong base” refers to guanine (G) or cytosine (C) bases as these nitrogenous bases form three hydrogen bond pairs and thus stronger bonds compared to the adenine (A) and thymine (T) base pairs.

[0064] The various illustrative logical blocks, modules, circuits, and algorithm operations described in connection with the embodiments disclosed herein may be implemented as electronic hardware, computer software, or combinations of both. To clearly illustrate this interchangeability of hardware and software, various illustrative components, blocks, modules, circuits, and operations have been described above generally in terms of their functionality. Whether such functionality is implemented as hardware or software depends upon the particular application and design constraints imposed on the overall system. Skilled artisans may implement the described functionality in varying ways for each particular application, but such implementation decisions should not be interpreted as causing a departure from the scope of the claims.

[0065] The hardware and systems used to implement the various illustrative logics, logical blocks, modules, and circuits described in connection with the aspects disclosed herein may be implemented or performed with a general purpose processor, a digital signal processor (DSP), an application specific integrated circuit (ASIC), a field programmable gate array (FPGA) or other programmable logic device, discrete gate or transistor logic, discrete hardware components, or any combination thereof designed to perform the functions described herein. A general-purpose processor may be a microprocessor, but, in the alternative, the processor may be any conventional processor, controller, microcontroller, or state machine. A processor may also be implemented as a combination of receiver smart objects, e.g., a combination of a DSP and a microprocessor, a plurality of microprocessors, one or more microprocessors in conjunction with a DSP core, or any other such configuration. Alternatively, some operations or methods may be performed by circuitry that is specific to a given function.

[0066] In embodiments, the functions of the systems described may be implemented in hardware, software, firmware, or any combination thereof. If implemented in software, the functions may be stored as one or more instructions or code on a non-transitory computer-readable storage medium or non-transitory processor-readable storage medium. The operations of a method or algorithm disclosed herein may be embodied in a processor-executable software module, which may reside on a non-transitory computer-readable or processor-readable storage medium. Non-transitory computer-readable or processor-readable storage media may be any storage media that may be accessed by a computer or a processor. By way of example but not limitation, such non-transitory computer-readable or processor-readable storage media may include RAM, ROM, EEPROM, FLASH memory, CD-ROM or other optical disk storage, magnetic disk storage or other magnetic storage smart objects, or any other medium that may be used to store desired program code in the form of instructions or data structures and that may be accessed by a computer. Disk and disc, as used herein, includes compact disc (CD), laser disc, optical disc, digital versatile disc (DVD), floppy disk, and Blu-ray disc where disks usually reproduce data magnetically, while discs reproduce data optically with lasers. Combinations of the above are also included within the scope of non-transitory computer-readable and processor-readable media. Additionally, the operations of a method or algorithm may reside as one or any combination or set of codes and/or instructions on a non-transitory processor-readable storage medium and/or computer-readable storage medium, which may be incorporated into a computer program product.

[0067] The term “computing device” is used herein to refer to an electronic device equipped with at least a processor. Examples of computing devices may include system or device described herein, mobile devices (e.g., cellular telephones, wearable devices, smartphones, smartwatches, web-pads, tablet computers, Internet enabled cellular telephones, Wi-Fi® enabled electronic devices, personal data assistants (PDAs), laptop computers, etc.), personal computers, and server computing devices. In various embodiments, computing devices may be configured with memory and/or storage as well as networking capabilities, such as network transceiver(s) and antenna(s) configured to establish a wide area network (WAN) connection (e.g., a cellular network connection, etc.) and/or a local area network (LAN) connection (e.g., a wired/wireless connection to the Internet via a Wi-Fi® router, etc.). In embodiments, the computing device is a mobile device, such as a cellular telephone, wearable device, or smartphone (e.g., iPhone, Android, Blackberry, Palm, Symbian, or Windows).

[0068] As used in this application, the terms “component”, “module”, “system”, and the like are intended to refer to a computer-related entity, either hardware, a combination of hardware and software, software, or software in execution. For example, a component may be, but is not limited to being, a process running on a processor, a processor, an object, an executable, a thread of execution, a program, and/or a computer. By way of illustration, both an application running on a server and the server can be a component. One or more components may reside within a process and/or thread of execution and a component may be localized on one computer and/or distributed between two or more computers.

[0069] As used herein, the term “data string” refers to a sequence of characters derived from a biological or computational data set, such as nucleotide sequences representing candidate probe segments. Each data string may comprise alphanumeric characters, symbols, or encoded representations corresponding to nucleotides or other sequence-based identifiers. The term “collection,” when used in reference to data strings, refers to one or more data strings grouped, organized, or processed together. A collection may comprise data strings derived from a single data set or from two or more distinct data sets. In one example, a collection of data strings may include candidate oligonucleotide sequences generated from exonic regions of a target gene. In another example, a collection may include sequences derived from multiple target genes or reference genomes. As used herein, a “plurality of data strings” refers to two or more data strings. Each data string may correspond to a candidate probe sequence comprising a first segment and a second segment, each segment having a length between 15 and 20 nucleotides, as described in the methods herein.

[0070] A [0070]s used herein, a “subsequence”, “substring”, “prefix” or “suffix” of a string represents a subset of characters, letters, words, etc., of a longer list of characters, letters, words, etc., (i.e., the longer list being the sequence or string) wherein the order of the elements is preserved. A “prefix” typically refers to a subset of characters, letters, numbers, etc. found at the beginning of a sequence or string, whereas a “suffix” typically refers to a subset of characters, letters, numbers, etc. found at the end of a string. Substrings are also known as subwords or factors of a sequence or string.

[0071] It is understood that the examples and embodiments described herein are for illustrative purposes only and that various modifications or changes in light thereof will be suggested to persons skilled in the art and are to be included within the spirit and purview of this application and scope of the appended claims. All publications, patents, and patent applications cited herein are hereby incorporated by reference in their entirety for all purposes.

### II. Compositions & Kits

[0072] In an aspect is provided an oligonucleotide probe including a sequence at least 80% homologous to SEQ ID NO:1 to SEQ ID NO:11418.

[0073] In another aspect is provided an oligonucleotide probe including a sequence at least 80% homologous to SEQ ID NO:11428 to SEQ ID NO:15539. In embodiments, the oligonucleotide probe includes a sequence 90% homologous to SEQ ID NO:11428 to SEQ ID NO:15539. In embodiments, the oligonucleotide probe includes a sequence selected from SEQ ID NO:11428 to SEQ ID NO:15539. In embodiments, the oligonucleotide probe includes first sequence selected from SEQ ID NO:11428 to SEQ ID NO:13483 and a second sequence selected from SEQ ID NO:13484 to SEQ ID NO:15539. In embodiments, the oligonucleotide probe includes a primer binding sequence, or complement thereof, selected from the following: SEQ ID NO:15540, SEQ ID NO:15541, SEQ ID NO:15542, SEQ ID NO:15543, SEQ ID NO:15544, or SEQ ID NO:15545.

[0074] In an aspect is provided a plurality of oligonucleotide probes, wherein each oligonucleotide probe includes a first end, a backbone sequence, and a second end, wherein the first end includes a sequence selected from SEQ ID NO:11428 to SEQ ID NO:13483 and the second end includes a sequence selected from SEQ ID NO:13484 to SEQ ID NO:15539. In embodiments, the oligonucleotide probe is in a cell or tissue. In embodiments, the cell or tissue further includes a concatemer including multiple complementary copies of the oligonucleotide probe. In embodiments, the cell or tissue is immobilized to a solid support.

[0075] A probe is a molecule designed to recognize (and bind or hybridize to) another molecule, e.g., a target analyte, another probe molecule, etc. As used herein, the term “probe” may refer either to a chemical/physical probe molecule (e.g., a nucleic acid probe molecule) or to its representation in a computer-readable, digital format (e.g., as a string of characters representing the sequence of bases in a nucleic acid probe molecule). In embodiments, the oligonucleotide probe is a linear nucleic acid molecule. Exemplary probes or probe sets may be based on a padlock probe, a gapped padlock probe, a SNAIL (Splint Nucleotide Assisted Intramolecular Ligation) probe set, a PLAYR (Proximity Ligation Assay for RNA) probe set, a PLISH (Proximity Ligation in situ Hybridization) probe set, and RNA-templated ligation probes (e.g., including 1 to 4 ribonucleotides near the ligation junction). The specific probe or probe set design can vary. In some embodiments, the probes, such as a padlock probe or a probe set that comprises a padlock probe, contain one or more barcodes in the backbone sequence. In some embodiments, one or more barcodes are indicative of a sequence in the analyte nucleic acid, such as a single nucleotide (e.g., SNPs or point mutations), a dinucleotide sequence, a short sequence of about 5 nucleotides in length, or a sequence of any suitable length.

[0076] In embodiments, the oligonucleotide probe includes a first binding sequence and a second binding sequence. In embodiments, the first sequence is at least 80% homologous to a sequence selected from SEQ ID NO:11428 to SEQ ID NO:13483. In embodiments, the first sequence is 80% homologous to a sequence selected from SEQ ID NO:11428 to SEQ ID NO:13483. In embodiments, the first sequence is at least 90% homologous to a sequence selected from SEQ ID NO:11428 to SEQ ID NO:13483. In embodiments, the first sequence is 90% homologous to a sequence selected from SEQ ID NO:11428 to SEQ ID NO:13483. In embodiments, the first sequence is a sequence selected from SEQ ID NO:11428 to SEQ ID NO:13483. In embodiments, the second sequence is at least 80% homologous to a sequence selected from SEQ ID NO:13484 to SEQ ID NO:15538. In embodiments, the second sequence is 80% homologous to a sequence selected from SEQ ID NO:13484 to SEQ ID NO:15538. In embodiments, the second sequence is at least 90% homologous to a sequence selected from SEQ ID NO:13484 to SEQ ID NO:15538. In embodiments, the second sequence is 90% homologous to a sequence selected from SEQ ID NO:13484 to SEQ ID NO:15538. In embodiments, the oligonucleotide probe includes a primer binding sequence, or complement thereof, selected from the following sequences: SEQ ID NO:15540, SEQ ID NO: 15541, SEQ ID NO: 15542, SEQ ID NO: 15543, SEQ ID NO: 15544, or SEQ ID NO: 15545.

[0077] In embodiments, the oligonucleotide probe includes SEQ ID NO:5710 to SEQ ID NO:11418. In embodiments, the oligonucleotide probe includes SEQ ID NO:1 to SEQ ID NO:5709. In embodiments, the oligonucleotide probe includes a primer binding sequence, or complement thereof, selected from the following sequences: SEQ ID NO:11419, SEQ ID NO:11420, SEQ ID NO:11421, SEQ ID NO:11422, SEQ ID NO:11423, SEQ ID NO:11424, SEQ ID NO:11425, or SEQ ID NO:11426.

[0078] In an aspect is provided a plurality of nucleic acid molecules, wherein each nucleic acid molecule comprises a first end, a backbone sequence, and a second end, wherein the first end includes a sequence selected from SEQ ID NO:11428 to SEQ ID NO:13483. In embodiments, the backbone sequence includes a sequencing primer binding sequence. In embodiments, the backbone includes a sequencing primer sequence. In embodiments, the backbone sequence includes a sequence selected from: SEQ ID NO:15540, SEQ ID NO: 15541, SEQ ID NO: 15542, SEQ ID NO: 15543, SEQ ID NO: 15544, and SEQ ID NO: 15545. In embodiments, the second end includes a sequence selected from SEQ ID NO:13484 to SEQ ID NO:15538. In embodiments, the backbone sequence includes a barcode sequence.

[0079] In an aspect is provided a plurality of nucleic acid molecules, wherein each nucleic acid molecule comprises a first end, a backbone sequence, and a second end, wherein the first end includes a sequence selected from SEQ ID NO:5710 to SEQ ID NO:11418. In embodiments, the backbone sequence includes a sequencing primer binding sequence. In embodiments, the backbone includes a sequencing primer sequence. In embodiments, the backbone sequence includes a sequence selected from: SEQ ID NO:11419, SEQ ID NO:11420, SEQ ID NO:11421, SEQ ID NO:11422, SEQ ID NO:11423, SEQ ID NO:11424, SEQ ID NO:11425, and SEQ ID NO:11426. In embodiments, the second end includes a sequence selected from SEQ ID NO:1 to SEQ ID NO:5709.

[0080] In embodiments, the oligonucleotide probe is about 50 to about 500 nucleotides in length. In embodiments, the oligonucleotide probe is about 50 to about 300 nucleotides in length. In embodiments, the oligonucleotide probe is about 80 to about 300 nucleotides in length. In embodiments, the oligonucleotide probe is about 50 to about 150 nucleotides in length. In embodiments, the oligonucleotide probe is about or more than about 40, 50, 75, 100, 125, 150, 175, 200, 250, 300, 350, 400, or 500 nucleotides in length. In embodiments, the oligonucleotide probe is less than about 50, 75, 100, 125, 150, 175, 200, 250, 300, 350, 400, or 500 nucleotides in length. In embodiments, each probe oligonucleotide (e.g., each probe oligonucleotide of a plurality of probe oligonucleotides) includes a primer binding sequence (i.e., a sequence complementary to a primer, such as an amplification or sequencing primer). In embodiments, the oligonucleotide probe is about 80 to about 90 nucleotides in length. In embodiments, the oligonucleotide probe is 80 to 100 nucleotides in length. In embodiments, the oligonucleotide probe is 80, 81, 82, 83, 84, 85, 86, 87, 88, 89, or 90 nucleotides. In embodiments, the oligonucleotide probe is 80 nucleotides. In embodiments, the oligonucleotide probe is 81 nucleotides. In embodiments, the oligonucleotide probe is 82 nucleotides. In embodiments, the oligonucleotide probe is 83 nucleotides. In embodiments, the oligonucleotide probe is 84 nucleotides. In embodiments, the oligonucleotide probe is 85 nucleotides. In embodiments, the oligonucleotide probe is 86 nucleotides. In embodiments, the oligonucleotide probe is 87 nucleotides. In embodiments, the oligonucleotide probe is 88 nucleotides. In embodiments, the oligonucleotide probe is 89 nucleotides. In embodiments, the oligonucleotide probe is 90 nucleotides.

[0081] In embodiments, the oligonucleotide probe includes a target hybridization sequence (i.e., a sequence complementary to a sequence of the target nucleic acid molecule). In embodiments, the target hybridization sequence includes 5 to 25 nucleotides. In embodiments, the target hybridization sequence is about 5 to about 35 nucleotides in length. In embodiments, the target hybridization sequence is about 12 to 15 nucleotides in length. In embodiments, the target hybridization sequence is about 15 to 30 nucleotides in length. In embodiments, the target hybridization sequence (e.g., the first and/or second target hybridization sequence) is greater than 30 nucleotides. In embodiments, the target hybridization sequence is about 5 to about 35 nucleotides in length. In embodiments, the target hybridization sequence is about 12 to 15 nucleotides in length. In embodiments, the target hybridization sequence is about 35 to 40 nucleotides in length to maximize specificity. In embodiments, the target hybridization sequence is greater than 12 nucleotides in length. In embodiments, the target hybridization sequence is 15 nucleotides in length. In embodiments, the target hybridization sequence is 20 nucleotides in length. In embodiments, the target hybridization sequence is 25 nucleotides in length. In embodiments, the target hybridization sequence is about 5, about 10, about 15, about 20, about 25, about 30, or about 35 nucleotides in length. In embodiments, the target hybridization sequence is about 5,6,7,8,9, 10, 11, 12, 13, 14, 15, 16, 17, 18, 19, 20, 21, 22, 23, 24, 25, 26, 27, 28, 29, 30, 31, 32, 33, 34, 35, 36, 37, 38, 39, 40, 41, 42, 43, 44, 45, 46, 47, 48, 49, or 50 nucleotides in length. In embodiments, the target hybridization sequence of each oligonucleotide primer is a single stranded polynucleotide that is at least 50% complementary, at least 75% complementary, at least 85% complementary, at least 90% complementary, at least 95% complementary, at least 98%, at least 99% complementary, or 100% complementary to a portion of a target polynucleotide. In embodiments, the target hybridization sequence includes about 45% to 65% GC content (i.e., the percentage of nucleobases that are either guanine or cytosine). In embodiments, the target hybridization sequence does not include 4 or more guanine or cytosine nucleobases. In embodiments, the target hybridization sequence is designed according to the methods and systems described herein.

[0082] In embodiments, the oligonucleotide does not include five consecutive weak bases. In embodiments, the oligonucleotide does not include five consecutive strong bases. In embodiments, the oligonucleotide does not include secondary structure. In embodiments, the oligonucleotide does not include 2, 3, 4, 5, 6, 7, 8, 9, or 10 consecutive weak bases. In embodiments, the oligonucleotide does not include 2, 3, 4, 5, 6, 7, 8, 9, or 10 consecutive strong bases. In embodiments, the oligonucleotide does not include 2, 3, 4, 5, 6, 7, 8, 9, or 10 consecutive weak bases or 2, 3, 4, 5, 6, 7, 8, 9, or 10 consecutive strong bases. In embodiments, the oligonucleotide does not include 2, 3, 4, 5, 6, 7, 8, 9, or 10 consecutive weak bases and does not include 2, 3, 4, 5, 6, 7, 8, 9, or 10 consecutive strong bases.

[0083] In embodiments, the oligonucleotide probe includes a sequence at least 80%, 85%, 90%, 95%, 98%, 99%, or 100% identical to: SEQ ID NO:13484, SEQ ID NO:13485, SEQ ID NO:13486, SEQ ID NO:13487, SEQ ID NO:13488, SEQ ID NO:13489, SEQ ID NO:13490, SEQ ID NO:13491, SEQ ID NO:13492, SEQ ID NO:13493, SEQ ID NO:13494, SEQ ID NO:13495, SEQ ID NO:13496, SEQ ID NO:13497, SEQ ID NO:13498, SEQ ID NO:13499, SEQ ID NO:13500, SEQ ID NO:13501, SEQ ID NO:13502, SEQ ID NO:13503, SEQ ID NO:13504, SEQ ID NO:13505, SEQ ID NO:13506, SEQ ID NO:13507, SEQ ID NO:13508, SEQ ID NO:13509, SEQ ID NO:13510, SEQ ID NO:13511, SEQ ID NO:13512, SEQ ID NO:13513, SEQ ID NO:13514, SEQ ID NO:13515, SEQ ID NO:13516, SEQ ID NO:13517, SEQ ID NO:13518, SEQ ID NO:13519, SEQ ID NO:13520, SEQ ID NO:13521, SEQ ID NO:13522, SEQ ID NO:13523, SEQ ID NO:13524, SEQ ID NO:13525, SEQ ID NO:13526, SEQ ID NO:13527, SEQ ID NO:13528, SEQ ID NO:13529, SEQ ID NO:13530, SEQ ID NO:13531, SEQ ID NO:13532, SEQ ID NO:13533, SEQ ID NO:13534, SEQ ID NO:13535, SEQ ID NO:13536, SEQ ID NO:13537, SEQ ID NO:13538, SEQ ID NO:13539, SEQ ID NO:13540, SEQ ID NO:13541, SEQ ID NO:13542, SEQ ID NO:13543, SEQ ID NO:13544, SEQ ID NO:13545, SEQ ID NO:13546, SEQ ID NO:13547, SEQ ID NO:13548, SEQ ID NO:13549, SEQ ID NO:13550, SEQ ID NO:13551, SEQ ID NO:13552, SEQ ID NO:13553, SEQ ID NO:13554, SEQ ID NO:13555, SEQ ID NO:13556, SEQ ID NO:13557, SEQ ID NO:13558, SEQ ID NO:13559, SEQ ID NO:13560, SEQ ID NO:13561, SEQ ID NO:13562, SEQ ID NO:13563, SEQ ID NO:13564, SEQ ID NO:13565, SEQ ID NO:13566, SEQ ID NO:13567, SEQ ID NO:13568, SEQ ID NO:13569, SEQ ID NO:13570, SEQ ID NO:13571, SEQ ID NO:13572, SEQ ID NO:13573, SEQ ID NO:13574, SEQ ID NO:13575, SEQ ID NO:13576, SEQ ID NO:13577, SEQ ID NO:13578, SEQ ID NO:13579, SEQ ID NO:13580, SEQ ID NO:13581, SEQ ID NO:13582, SEQ ID NO:13583, SEQ ID NO:13584, SEQ ID NO:13585, SEQ ID NO:13586, SEQ ID NO:13587, SEQ ID NO:13588, SEQ ID NO:13589, SEQ ID NO:13590, SEQ ID NO:13591, SEQ ID NO:13592, SEQ ID NO:13593, SEQ ID NO:13594, SEQ ID NO:13595, SEQ ID NO:13596, SEQ ID NO:13597, SEQ ID NO:13598, SEQ ID NO:13599, SEQ ID NO:13600, SEQ ID NO:13601, SEQ ID NO:13602, SEQ ID NO:13603, SEQ ID NO:13604, SEQ ID NO:13605, SEQ ID NO:13606, SEQ ID NO:13607, SEQ ID NO:13608, SEQ ID NO:13609, SEQ ID NO:13610, SEQ ID NO:13611, SEQ ID NO:13612, SEQ ID NO:13613, SEQ ID NO:13614, SEQ ID NO:13615, SEQ ID NO:13616, SEQ ID NO:13617, SEQ ID NO:13618, SEQ ID NO:13619, SEQ ID NO:13620, SEQ ID NO:13621, SEQ ID NO:13622, SEQ ID NO:13623, SEQ ID NO:13624, SEQ ID NO:13625, SEQ ID NO:13626, SEQ ID NO:13627, SEQ ID NO:13628, SEQ ID NO:13629, SEQ ID NO:13630, SEQ ID NO:13631, SEQ ID NO:13632, SEQ ID NO:13633, SEQ ID NO:13634, SEQ ID NO:13635, SEQ ID NO:13636, SEQ ID NO:13637, SEQ ID NO:13638, SEQ ID NO:13639, SEQ ID NO:13640, SEQ ID NO:13641, SEQ ID NO:13642, SEQ ID NO:13643, SEQ ID NO:13644, SEQ ID NO:13645, SEQ ID NO:13646, SEQ ID NO:13647, SEQ ID NO:13648, SEQ ID NO:13649, SEQ ID NO:13650, SEQ ID NO:13651, SEQ ID NO:13652, SEQ ID NO:13653, SEQ ID NO:13654, SEQ ID NO:13655, SEQ ID NO:13656, SEQ ID NO:13657, SEQ ID NO:13658, SEQ ID NO:13659, SEQ ID NO:13660, SEQ ID NO:13661, SEQ ID NO:13662, SEQ ID NO:13663, SEQ ID NO:13664, SEQ ID NO:13665, SEQ ID NO:13666, SEQ ID NO:13667, SEQ ID NO:13668, SEQ ID NO:13669, SEQ ID NO:13670, SEQ ID NO:13671, SEQ ID NO:13672, SEQ ID NO:13673, SEQ ID NO:13674, SEQ ID NO:13675, SEQ ID NO:13676, SEQ ID NO:13677, SEQ ID NO:13678, SEQ ID NO:13679, SEQ ID NO:13680, SEQ ID NO:13681, SEQ ID NO:13682, SEQ ID NO:13683, SEQ ID NO:13684, SEQ ID NO:13685, SEQ ID NO:13686, SEQ ID NO:13687, SEQ ID NO:13688, SEQ ID NO:13689, SEQ ID NO:13690, SEQ ID NO:13691, SEQ ID NO:13692, SEQ ID NO:13693, SEQ ID NO:13694, SEQ ID NO:13695, SEQ ID NO:13696, SEQ ID NO:13697, SEQ ID NO:13698, SEQ ID NO:13699, SEQ ID NO:13700, SEQ ID NO:13701, SEQ ID NO:13702, SEQ ID NO:13703, SEQ ID NO:13704, SEQ ID NO:13705, SEQ ID NO:13706, SEQ ID NO:13707, SEQ ID NO:13708, SEQ ID NO:13709, SEQ ID NO:13710, SEQ ID NO:13711, SEQ ID NO:13712, SEQ ID NO:13713, SEQ ID NO:13714, SEQ ID NO:13715, SEQ ID NO:13716, SEQ ID NO:13717, SEQ ID NO:13718, SEQ ID NO:13719, SEQ ID NO:13720, SEQ ID NO:13721, SEQ ID NO:13722, SEQ ID NO:13723, SEQ ID NO:13724, SEQ ID NO:13725, SEQ ID NO:13726, SEQ ID NO:13727, SEQ ID NO:13728, SEQ ID NO:13729, SEQ ID NO:13730, SEQ ID NO:13731, SEQ ID NO:13732, SEQ ID NO:13733, SEQ ID NO:13734, SEQ ID NO:13735, SEQ ID NO:13736, SEQ ID NO:13737, SEQ ID NO:13738, SEQ ID NO:13739, SEQ ID NO:13740, SEQ ID NO:13741, SEQ ID NO:13742, SEQ ID NO:13743, SEQ ID NO:13744, SEQ ID NO:13745, SEQ ID NO:13746, SEQ ID NO:13747, SEQ ID NO:13748, SEQ ID NO:13749, SEQ ID NO:13750, SEQ ID NO:13751, SEQ ID NO:13752, SEQ ID NO:13753, SEQ ID NO:13754, SEQ ID NO:13755, SEQ ID NO:13756, SEQ ID NO:13757, SEQ ID NO:13758, SEQ ID NO:13759, SEQ ID NO:13760, SEQ ID NO:13761, SEQ ID NO:13762, SEQ ID NO:13763, SEQ ID NO:13764, SEQ ID NO:13765, SEQ ID NO:13766, SEQ ID NO:13767, SEQ ID NO:13768, SEQ ID NO:13769, SEQ ID NO:13770, SEQ ID NO:13771, SEQ ID NO:13772, SEQ ID NO:13773, SEQ ID NO:13774, SEQ ID NO:13775, SEQ ID NO:13776, SEQ ID NO:13777, SEQ ID NO:13778, SEQ ID NO:13779, SEQ ID NO:13780, SEQ ID NO:13781, SEQ ID NO:13782, SEQ ID NO:13783, SEQ ID NO:13784, SEQ ID NO:13785, SEQ ID NO:13786, SEQ ID NO:13787, SEQ ID NO:13788, SEQ ID NO:13789, SEQ ID NO:13790, SEQ ID NO:13791, SEQ ID NO:13792, SEQ ID NO:13793, SEQ ID NO:13794, SEQ ID NO:13795, SEQ ID NO:13796, SEQ ID NO:13797, SEQ ID NO:13798, SEQ ID NO:13799, SEQ ID NO:13800, SEQ ID NO:13801, SEQ ID NO:13802, SEQ ID NO:13803, SEQ ID NO:13804, SEQ ID NO:13805, SEQ ID NO:13806, SEQ ID NO:13807, SEQ ID NO:13808, SEQ ID NO:13809, SEQ ID NO:13810, SEQ ID NO:13811, SEQ ID NO:13812, SEQ ID NO:13813, SEQ ID NO:13814, SEQ ID NO:13815, SEQ ID NO:13816, SEQ ID NO:13817, SEQ ID NO:13818, SEQ ID NO:13819, SEQ ID NO:13820, SEQ ID NO:13821, SEQ ID NO:13822, SEQ ID NO:13823, SEQ ID NO:13824, SEQ ID NO:13825, SEQ ID NO:13826, SEQ ID NO:13827, SEQ ID NO:13828, SEQ ID NO:13829, SEQ ID NO:13830, SEQ ID NO:13831, SEQ ID NO:13832, SEQ ID NO:13833, SEQ ID NO:13834, SEQ ID NO:13835, SEQ ID NO:13836, SEQ ID NO:13837, SEQ ID NO:13838, SEQ ID NO:13839, SEQ ID NO:13840, SEQ ID NO:13841, SEQ ID NO:13842, SEQ ID NO:13843, SEQ ID NO:13844, SEQ ID NO:13845, SEQ ID NO:13846, SEQ ID NO:13847, SEQ ID NO:13848, SEQ ID NO:13849, SEQ ID NO:13850, SEQ ID NO:13851, SEQ ID NO:13852, SEQ ID NO:13853, SEQ ID NO:13854, SEQ ID NO:13855, SEQ ID NO:13856, SEQ ID NO:13857, SEQ ID NO:13858, SEQ ID NO:13859, SEQ ID NO:13860, SEQ ID NO:13861, SEQ ID NO:13862, SEQ ID NO:13863, SEQ ID NO:13864, SEQ ID NO:13865, SEQ ID NO:13866, SEQ ID NO:13867, SEQ ID NO:13868, SEQ ID NO:13869, SEQ ID NO:13870, SEQ ID NO:13871, SEQ ID NO:13872, SEQ ID NO:13873, SEQ ID NO:13874, SEQ ID NO:13875, SEQ ID NO:13876, SEQ ID NO:13877, SEQ ID NO:13878, SEQ ID NO:13879, SEQ ID NO:13880, SEQ ID NO:13881, SEQ ID NO:13882, SEQ ID NO:13883, SEQ ID NO:13884, SEQ ID NO:13885, SEQ ID NO:13886, SEQ ID NO:13887, SEQ ID NO:13888, SEQ ID NO:13889, SEQ ID NO:13890, SEQ ID NO:13891, SEQ ID NO:13892, SEQ ID NO:13893, SEQ ID NO:13894, SEQ ID NO:13895, SEQ ID NO:13896, SEQ ID NO:13897, SEQ ID NO:13898, SEQ ID NO:13899, SEQ ID NO:13900, SEQ ID NO:13901, SEQ ID NO:13902, SEQ ID NO:13903, SEQ ID NO:13904, SEQ ID NO:13905, SEQ ID NO:13906, SEQ ID NO:13907, SEQ ID NO:13908, SEQ ID NO:13909, SEQ ID NO:13910, SEQ ID NO:13911, SEQ ID NO:13912, SEQ ID NO:13913, SEQ ID NO:13914, SEQ ID NO:13915, SEQ ID NO:13916, SEQ ID NO:13917, SEQ ID NO:13918, SEQ ID NO:13919, SEQ ID NO:13920, SEQ ID NO:13921, SEQ ID NO:13922, SEQ ID NO:13923, SEQ ID NO:13924, SEQ ID NO:13925, SEQ ID NO:13926, SEQ ID NO:13927, SEQ ID NO:13928, SEQ ID NO:13929, SEQ ID NO:13930, SEQ ID NO:13931, SEQ ID NO:13932, SEQ ID NO:13933, SEQ ID NO:13934, SEQ ID NO:13935, SEQ ID NO:13936, SEQ ID NO:13937, SEQ ID NO:13938, SEQ ID NO:13939, SEQ ID NO:13940, SEQ ID NO:13941, SEQ ID NO:13942, SEQ ID NO:13943, SEQ ID NO:13944, SEQ ID NO:13945, SEQ ID NO:13946, SEQ ID NO:13947, SEQ ID NO:13948, SEQ ID NO:13949, SEQ ID NO:13950, SEQ ID NO:13951, SEQ ID NO:13952, SEQ ID NO:13953, SEQ ID NO:13954, SEQ ID NO:13955, SEQ ID NO:13956, SEQ ID NO:13957, SEQ ID NO:13958, SEQ ID NO:13959, SEQ ID NO:13960, SEQ ID NO:13961, SEQ ID NO:13962, SEQ ID NO:13963, SEQ ID NO:13964, SEQ ID NO:13965, SEQ ID NO:13966, SEQ ID NO:13967, SEQ ID NO:13968, SEQ ID NO:13969, SEQ ID NO:13970, SEQ ID NO:13971, SEQ ID NO:13972, SEQ ID NO:13973, SEQ ID NO:13974, SEQ ID NO:13975, SEQ ID NO:13976, SEQ ID NO:13977, SEQ ID NO:13978, SEQ ID NO:13979, SEQ ID NO:13980, SEQ ID NO:13981, SEQ ID NO:13982, SEQ ID NO:13983, SEQ ID NO:13984, SEQ ID NO:13985, SEQ ID NO:13986, SEQ ID NO:13987, SEQ ID NO:13988, SEQ ID NO:13989, SEQ ID NO:13990, SEQ ID NO:13991, SEQ ID NO:13992, SEQ ID NO:13993, SEQ ID NO:13994, SEQ ID NO:13995, SEQ ID NO:13996, SEQ ID NO:13997, SEQ ID NO:13998, SEQ ID NO:13999, SEQ ID NO:14000, SEQ ID NO:14001, SEQ ID NO:14002, SEQ ID NO:14003, SEQ ID NO:14004, SEQ ID NO:14005, SEQ ID NO:14006, SEQ ID NO:14007, SEQ ID NO:14008, SEQ ID NO:14009, SEQ ID NO:14010, SEQ ID NO:14011, SEQ ID NO:14012, SEQ ID NO:14013, SEQ ID NO:14014, SEQ ID NO:14015, SEQ ID NO:14016, SEQ ID NO:14017, SEQ ID NO:14018, SEQ ID NO:14019, SEQ ID NO:14020, SEQ ID NO:14021, SEQ ID NO:14022, SEQ ID NO:14023, SEQ ID NO:14024, SEQ ID NO:14025, SEQ ID NO:14026, SEQ ID NO:14027, SEQ ID NO:14028, SEQ ID NO:14029, SEQ ID NO:14030, SEQ ID NO:14031, SEQ ID NO:14032, SEQ ID NO:14033, SEQ ID NO:14034, SEQ ID NO:14035, SEQ ID NO:14036, SEQ ID NO:14037, SEQ ID NO:14038, SEQ ID NO:14039, SEQ ID NO:14040, SEQ ID NO:14041, SEQ ID NO:14042, SEQ ID NO:14043, SEQ ID NO:14044, SEQ ID NO:14045, SEQ ID NO:14046, SEQ ID NO:14047, SEQ ID NO:14048, SEQ ID NO:14049, SEQ ID NO:14050, SEQ ID NO:14051, SEQ ID NO:14052, SEQ ID NO:14053, SEQ ID NO:14054, SEQ ID NO:14055, SEQ ID NO:14056, SEQ ID NO:14057, SEQ ID NO:14058, SEQ ID NO:14059, SEQ ID NO:14060, SEQ ID NO:14061, SEQ ID NO:14062, SEQ ID NO:14063, SEQ ID NO:14064, SEQ ID NO:14065, SEQ ID NO:14066, SEQ ID NO:14067, SEQ ID NO:14068, SEQ ID NO:14069, SEQ ID NO:14070, SEQ ID NO:14071, SEQ ID NO:14072, SEQ ID NO:14073, SEQ ID NO:14074, SEQ ID NO:14075, SEQ ID NO:14076, SEQ ID NO:14077, SEQ ID NO:14078, SEQ ID NO:14079, SEQ ID NO:14080, SEQ ID NO:14081, SEQ ID NO:14082, SEQ ID NO:14083, SEQ ID NO:14084, SEQ ID NO:14085, SEQ ID NO:14086, SEQ ID NO:14087, SEQ ID NO:14088, SEQ ID NO:14089, SEQ ID NO:14090, SEQ ID NO:14091, SEQ ID NO:14092, SEQ ID NO:14093, SEQ ID NO:14094, SEQ ID NO:14095, SEQ ID NO:14096, SEQ ID NO:14097, SEQ ID NO:14098, SEQ ID NO:14099, SEQ ID NO:14100, SEQ ID NO:14101, SEQ ID NO:14102, SEQ ID NO:14103, SEQ ID NO:14104, SEQ ID NO:14105, SEQ ID NO:14106, SEQ ID NO:14107, SEQ ID NO:14108, SEQ ID NO:14109, SEQ ID NO:14110, SEQ ID NO:14111, SEQ ID NO:14112, SEQ ID NO:14113, SEQ ID NO:14114, SEQ ID NO:14115, SEQ ID NO:14116, SEQ ID NO:14117, SEQ ID NO:14118, SEQ ID NO:14119, SEQ ID NO:14120, SEQ ID NO:14121, SEQ ID NO:14122, SEQ ID NO:14123, SEQ ID NO:14124, SEQ ID NO:14125, SEQ ID NO:14126, SEQ ID NO:14127, SEQ ID NO:14128, SEQ ID NO:14129, SEQ ID NO:14130, SEQ ID NO:14131, SEQ ID NO:14132, SEQ ID NO:14133, SEQ ID NO:14134, SEQ ID NO:14135, SEQ ID NO:14136, SEQ ID NO:14137, SEQ ID NO:14138, SEQ ID NO:14139, SEQ ID NO:14140, SEQ ID NO:14141, SEQ ID NO:14142, SEQ ID NO:14143, SEQ ID NO:14144, SEQ ID NO:14145, SEQ ID NO:14146, SEQ ID NO:14147, SEQ ID NO:14148, SEQ ID NO:14149, SEQ ID NO:14150, SEQ ID NO:14151, SEQ ID NO:14152, SEQ ID NO:14153, SEQ ID NO:14154, SEQ ID NO:14155, SEQ ID NO:14156, SEQ ID NO:14157, SEQ ID NO:14158, SEQ ID NO:14159, SEQ ID NO:14160, SEQ ID NO:14161, SEQ ID NO:14162, SEQ ID NO:14163, SEQ ID NO:14164, SEQ ID NO:14165, SEQ ID NO:14166, SEQ ID NO:14167, SEQ ID NO:14168, SEQ ID NO:14169, SEQ ID NO:14170, SEQ ID NO:14171, SEQ ID NO:14172, SEQ ID NO:14173, SEQ ID NO:14174, SEQ ID NO:14175, SEQ ID NO:14176, SEQ ID NO:14177, SEQ ID NO:14178, SEQ ID NO:14179, SEQ ID NO:14180, SEQ ID NO:14181, SEQ ID NO:14182, SEQ ID NO:14183, SEQ ID NO:14184, SEQ ID NO:14185, SEQ ID NO:14186, SEQ ID NO:14187, SEQ ID NO:14188, SEQ ID NO:14189, SEQ ID NO:14190, SEQ ID NO:14191, SEQ ID NO:14192, SEQ ID NO:14193, SEQ ID NO:14194, SEQ ID NO:14195, SEQ ID NO:14196, SEQ ID NO:14197, SEQ ID NO:14198, SEQ ID NO:14199, SEQ ID NO:14200, SEQ ID NO:14201, SEQ ID NO:14202, SEQ ID NO:14203, SEQ ID NO:14204, SEQ ID NO:14205, SEQ ID NO:14206, SEQ ID NO:14207, SEQ ID NO:14208, SEQ ID NO:14209, SEQ ID NO:14210, SEQ ID NO:14211, SEQ ID NO:14212, SEQ ID NO:14213, SEQ ID NO:14214, SEQ ID NO:14215, SEQ ID NO:14216, SEQ ID NO:14217, SEQ ID NO:14218, SEQ ID NO:14219, SEQ ID NO:14220, SEQ ID NO:14221, SEQ ID NO:14222, SEQ ID NO:14223, SEQ ID NO:14224, SEQ ID NO:14225, SEQ ID NO:14226, SEQ ID NO:14227, SEQ ID NO:14228, SEQ ID NO:14229, SEQ ID NO:14230, SEQ ID NO:14231, SEQ ID NO:14232, SEQ ID NO:14233, SEQ ID NO:14234, SEQ ID NO:14235, SEQ ID NO:14236, SEQ ID NO:14237, SEQ ID NO:14238, SEQ ID NO:14239, SEQ ID NO:14240, SEQ ID NO:14241, SEQ ID NO:14242, SEQ ID NO:14243, SEQ ID NO:14244, SEQ ID NO:14245, SEQ ID NO:14246, SEQ ID NO:14247, SEQ ID NO:14248, SEQ ID NO:14249, SEQ ID NO:14250, SEQ ID NO:14251, SEQ ID NO:14252, SEQ ID NO:14253, SEQ ID NO:14254, SEQ ID NO:14255, SEQ ID NO:14256, SEQ ID NO:14257, SEQ ID NO:14258, SEQ ID NO:14259, SEQ ID NO:14260, SEQ ID NO:14261, SEQ ID NO:14262, SEQ ID NO:14263, SEQ ID NO:14264, SEQ ID NO:14265, SEQ ID NO:14266, SEQ ID NO:14267, SEQ ID NO:14268, SEQ ID NO:14269, SEQ ID NO:14270, SEQ ID NO:14271, SEQ ID NO:14272, SEQ ID NO:14273, SEQ ID NO:14274, SEQ ID NO:14275, SEQ ID NO:14276, SEQ ID NO:14277, SEQ ID NO:14278, SEQ ID NO:14279, SEQ ID NO:14280, SEQ ID NO:14281, SEQ ID NO:14282, SEQ ID NO:14283, SEQ ID NO:14284, SEQ ID NO:14285, SEQ ID NO:14286, SEQ ID NO:14287, SEQ ID NO:14288, SEQ ID NO:14289, SEQ ID NO:14290, SEQ ID NO:14291, SEQ ID NO:14292, SEQ ID NO:14293, SEQ ID NO:14294, SEQ ID NO:14295, SEQ ID NO:14296, SEQ ID NO:14297, SEQ ID NO:14298, SEQ ID NO:14299, SEQ ID NO:14300, SEQ ID NO:14301, SEQ ID NO:14302, SEQ ID NO:14303, SEQ ID NO:14304, SEQ ID NO:14305, SEQ ID NO:14306, SEQ ID NO:14307, SEQ ID NO:14308, SEQ ID NO:14309, SEQ ID NO:14310, SEQ ID NO:14311, SEQ ID NO:14312, SEQ ID NO:14313, SEQ ID NO:14314, SEQ ID NO:14315, SEQ ID NO:14316, SEQ ID NO:14317, SEQ ID NO:14318, SEQ ID NO:14319, SEQ ID NO:14320, SEQ ID NO:14321, SEQ ID NO:14322, SEQ ID NO:14323, SEQ ID NO:14324, SEQ ID NO:14325, SEQ ID NO:14326, SEQ ID NO:14327, SEQ ID NO:14328, SEQ ID NO:14329, SEQ ID NO:14330, SEQ ID NO:14331, SEQ ID NO:14332, SEQ ID NO:14333, SEQ ID NO:14334, SEQ ID NO:14335, SEQ ID NO:14336, SEQ ID NO:14337, SEQ ID NO:14338, SEQ ID NO:14339, SEQ ID NO:14340, SEQ ID NO:14341, SEQ ID NO:14342, SEQ ID NO:14343, SEQ ID NO:14344, SEQ ID NO:14345, SEQ ID NO:14346, SEQ ID NO:14347, SEQ ID NO:14348, SEQ ID NO:14349, SEQ ID NO:14350, SEQ ID NO:14351, SEQ ID NO:14352, SEQ ID NO:14353, SEQ ID NO:14354, SEQ ID NO:14355, SEQ ID NO:14356, SEQ ID NO:14357, SEQ ID NO:14358, SEQ ID NO:14359, SEQ ID NO:14360, SEQ ID NO:14361, SEQ ID NO:14362, SEQ ID NO:14363, SEQ ID NO:14364, SEQ ID NO:14365, SEQ ID NO:14366, SEQ ID NO:14367, SEQ ID NO:14368, SEQ ID NO:14369, SEQ ID NO:14370, SEQ ID NO:14371, SEQ ID NO:14372, SEQ ID NO:14373, SEQ ID NO:14374, SEQ ID NO:14375, SEQ ID NO:14376, SEQ ID NO:14377, SEQ ID NO:14378, SEQ ID NO:14379, SEQ ID NO:14380, SEQ ID NO:14381, SEQ ID NO:14382, SEQ ID NO:14383, SEQ ID NO:14384, SEQ ID NO:14385, SEQ ID NO:14386, SEQ ID NO:14387, SEQ ID NO:14388, SEQ ID NO:14389, SEQ ID NO:14390, SEQ ID NO:14391, SEQ ID NO:14392, SEQ ID NO:14393, SEQ ID NO:14394, SEQ ID NO:14395, SEQ ID NO:14396, SEQ ID NO:14397, SEQ ID NO:14398, SEQ ID NO:14399, SEQ ID NO:14400, SEQ ID NO:14401, SEQ ID NO:14402, SEQ ID NO:14403, SEQ ID NO:14404, SEQ ID NO:14405, SEQ ID NO:14406, SEQ ID NO:14407, SEQ ID NO:14408, SEQ ID NO:14409, SEQ ID NO:14410, SEQ ID NO:14411, SEQ ID NO:14412, SEQ ID NO:14413, SEQ ID NO:14414, SEQ ID NO:14415, SEQ ID NO:14416, SEQ ID NO:14417, SEQ ID NO:14418, SEQ ID NO:14419, SEQ ID NO:14420, SEQ ID NO:14421, SEQ ID NO:14422, SEQ ID NO:14423, SEQ ID NO:14424, SEQ ID NO:14425, SEQ ID NO:14426, SEQ ID NO:14427, SEQ ID NO:14428, SEQ ID NO:14429, SEQ ID NO:14430, SEQ ID NO:14431, SEQ ID NO:14432, SEQ ID NO:14433, SEQ ID NO:14434, SEQ ID NO:14435, SEQ ID NO:14436, SEQ ID NO:14437, SEQ ID NO:14438, SEQ ID NO:14439, SEQ ID NO:14440, SEQ ID NO:14441, SEQ ID NO:14442, SEQ ID NO:14443, SEQ ID NO:14444, SEQ ID NO:14445, SEQ ID NO:14446, SEQ ID NO:14447, SEQ ID NO:14448, SEQ ID NO:14449, SEQ ID NO:14450, SEQ ID NO:14451, SEQ ID NO:14452, SEQ ID NO:14453, SEQ ID NO:14454, SEQ ID NO:14455, SEQ ID NO:14456, SEQ ID NO:14457, SEQ ID NO:14458, SEQ ID NO:14459, SEQ ID NO:14460, SEQ ID NO:14461, SEQ ID NO:14462, SEQ ID NO:14463, SEQ ID NO:14464, SEQ ID NO:14465, SEQ ID NO:14466, SEQ ID NO:14467, SEQ ID NO:14468, SEQ ID NO:14469, SEQ ID NO:14470, SEQ ID NO:14471, SEQ ID NO:14472, SEQ ID NO:14473, SEQ ID NO:14474, SEQ ID NO:14475, SEQ ID NO:14476, SEQ ID NO:14477, SEQ ID NO:14478, SEQ ID NO:14479, SEQ ID NO:14480, SEQ ID NO:14481, SEQ ID NO:14482, SEQ ID NO:14483, SEQ ID NO:14484, SEQ ID NO:14485, SEQ ID NO:14486, SEQ ID NO:14487, SEQ ID NO:14488, SEQ ID NO:14489, SEQ ID NO:14490, SEQ ID NO:14491, SEQ ID NO:14492, SEQ ID NO:14493, SEQ ID NO:14494, SEQ ID NO:14495, SEQ ID NO:14496, SEQ ID NO:14497, SEQ ID NO:14498, SEQ ID NO:14499, SEQ ID NO:14500, SEQ ID NO:14501, SEQ ID NO:14502, SEQ ID NO:14503, SEQ ID NO:14504, SEQ ID NO:14505, SEQ ID NO:14506, SEQ ID NO:14507, SEQ ID NO:14508, SEQ ID NO:14509, SEQ ID NO:14510, SEQ ID NO:14511, SEQ ID NO:14512, SEQ ID NO:14513, SEQ ID NO:14514, SEQ ID NO:14515, SEQ ID NO:14516, SEQ ID NO:14517, SEQ ID NO:14518, SEQ ID NO:14519, SEQ ID NO:14520, SEQ ID NO:14521, SEQ ID NO:14522, SEQ ID NO:14523, SEQ ID NO:14524, SEQ ID NO:14525, SEQ ID NO:14526, SEQ ID NO:14527, SEQ ID NO:14528, SEQ ID NO:14529, SEQ ID NO:14530, SEQ ID NO:14531, SEQ ID NO:14532, SEQ ID NO:14533, SEQ ID NO:14534, SEQ ID NO:14535, SEQ ID NO:14536, SEQ ID NO:14537, SEQ ID NO:14538, SEQ ID NO:14539, SEQ ID NO:14540, SEQ ID NO:14541, SEQ ID NO:14542, SEQ ID NO:14543, SEQ ID NO:14544, SEQ ID NO:14545, SEQ ID NO:14546, SEQ ID NO:14547, SEQ ID NO:14548, SEQ ID NO:14549, SEQ ID NO:14550, SEQ ID NO:14551, SEQ ID NO:14552, SEQ ID NO:14553, SEQ ID NO:14554, SEQ ID NO:14555, SEQ ID NO:14556, SEQ ID NO:14557, SEQ ID NO:14558, SEQ ID NO:14559, SEQ ID NO:14560, SEQ ID NO:14561, SEQ ID NO:14562, SEQ ID NO:14563, SEQ ID NO:14564, SEQ ID NO:14565, SEQ ID NO:14566, SEQ ID NO:14567, SEQ ID NO:14568, SEQ ID NO:14569, SEQ ID NO:14570, SEQ ID NO:14571, SEQ ID NO:14572, SEQ ID NO:14573, SEQ ID NO:14574, SEQ ID NO:14575, SEQ ID NO:14576, SEQ ID NO:14577, SEQ ID NO:14578, SEQ ID NO:14579, SEQ ID NO:14580, SEQ ID NO:14581, SEQ ID NO:14582, SEQ ID NO:14583, SEQ ID NO:14584, SEQ ID NO:14585, SEQ ID NO:14586, SEQ ID NO:14587, SEQ ID NO:14588, SEQ ID NO:14589, SEQ ID NO:14590, SEQ ID NO:14591, SEQ ID NO:14592, SEQ ID NO:14593, SEQ ID NO:14594, SEQ ID NO:14595, SEQ ID NO:14596, SEQ ID NO:14597, SEQ ID NO:14598, SEQ ID NO:14599, SEQ ID NO:14600, SEQ ID NO:14601, SEQ ID NO:14602, SEQ ID NO:14603, SEQ ID NO:14604, SEQ ID NO:14605, SEQ ID NO:14606, SEQ ID NO:14607, SEQ ID NO:14608, SEQ ID NO:14609, SEQ ID NO:14610, SEQ ID NO:14611, SEQ ID NO:14612, SEQ ID NO:14613, SEQ ID NO:14614, SEQ ID NO:14615, SEQ ID NO:14616, SEQ ID NO:14617, SEQ ID NO:14618, SEQ ID NO:14619, SEQ ID NO:14620, SEQ ID NO:14621, SEQ ID NO:14622, SEQ ID NO:14623, SEQ ID NO:14624, SEQ ID NO:14625, SEQ ID NO:14626, SEQ ID NO:14627, SEQ ID NO:14628, SEQ ID NO:14629, SEQ ID NO:14630, SEQ ID NO:14631, SEQ ID NO:14632, SEQ ID NO:14633, SEQ ID NO:14634, SEQ ID NO:14635, SEQ ID NO:14636, SEQ ID NO:14637, SEQ ID NO:14638, SEQ ID NO:14639, SEQ ID NO:14640, SEQ ID NO:14641, SEQ ID NO:14642, SEQ ID NO:14643, SEQ ID NO:14644, SEQ ID NO:14645, SEQ ID NO:14646, SEQ ID NO:14647, SEQ ID NO:14648, SEQ ID NO:14649, SEQ ID NO:14650, SEQ ID NO:14651, SEQ ID NO:14652, SEQ ID NO:14653, SEQ ID NO:14654, SEQ ID NO:14655, SEQ ID NO:14656, SEQ ID NO:14657, SEQ ID NO:14658, SEQ ID NO:14659, SEQ ID NO:14660, SEQ ID NO:14661, SEQ ID NO:14662, SEQ ID NO:14663, SEQ ID NO:14664, SEQ ID NO:14665, SEQ ID NO:14666, SEQ ID NO:14667, SEQ ID NO:14668, SEQ ID NO:14669, SEQ ID NO:14670, SEQ ID NO:14671, SEQ ID NO:14672, SEQ ID NO:14673, SEQ ID NO:14674, SEQ ID NO:14675, SEQ ID NO:14676, SEQ ID NO:14677, SEQ ID NO:14678, SEQ ID NO:14679, SEQ ID NO:14680, SEQ ID NO:14681, SEQ ID NO:14682, SEQ ID NO:14683, SEQ ID NO:14684, SEQ ID NO:14685, SEQ ID NO:14686, SEQ ID NO:14687, SEQ ID NO:14688, SEQ ID NO:14689, SEQ ID NO:14690, SEQ ID NO:14691, SEQ ID NO:14692, SEQ ID NO:14693, SEQ ID NO:14694, SEQ ID NO:14695, SEQ ID NO:14696, SEQ ID NO:14697, SEQ ID NO:14698, SEQ ID NO:14699, SEQ ID NO:14700, SEQ ID NO:14701, SEQ ID NO:14702, SEQ ID NO:14703, SEQ ID NO:14704, SEQ ID NO:14705, SEQ ID NO:14706, SEQ ID NO:14707, SEQ ID NO:14708, SEQ ID NO:14709, SEQ ID NO:14710, SEQ ID NO:14711, SEQ ID NO:14712, SEQ ID NO:14713, SEQ ID NO:14714, SEQ ID NO:14715, SEQ ID NO:14716, SEQ ID NO:14717, SEQ ID NO:14718, SEQ ID NO:14719, SEQ ID NO:14720, SEQ ID NO:14721, SEQ ID NO:14722, SEQ ID NO:14723, SEQ ID NO:14724, SEQ ID NO:14725, SEQ ID NO:14726, SEQ ID NO:14727, SEQ ID NO:14728, SEQ ID NO:14729, SEQ ID NO:14730, SEQ ID NO:14731, SEQ ID NO:14732, SEQ ID NO:14733, SEQ ID NO:14734, SEQ ID NO:14735, SEQ ID NO:14736, SEQ ID NO:14737, SEQ ID NO:14738, SEQ ID NO:14739, SEQ ID NO:14740, SEQ ID NO:14741, SEQ ID NO:14742, SEQ ID NO:14743, SEQ ID NO:14744, SEQ ID NO:14745, SEQ ID NO:14746, SEQ ID NO:14747, SEQ ID NO:14748, SEQ ID NO:14749, SEQ ID NO:14750, SEQ ID NO:14751, SEQ ID NO:14752, SEQ ID NO:14753, SEQ ID NO:14754, SEQ ID NO:14755, SEQ ID NO:14756, SEQ ID NO:14757, SEQ ID NO:14758, SEQ ID NO:14759, SEQ ID NO:14760, SEQ ID NO:14761, SEQ ID NO:14762, SEQ ID NO:14763, SEQ ID NO:14764, SEQ ID NO:14765, SEQ ID NO:14766, SEQ ID NO:14767, SEQ ID NO:14768, SEQ ID NO:14769, SEQ ID NO:14770, SEQ ID NO:14771, SEQ ID NO:14772, SEQ ID NO:14773, SEQ ID NO:14774, SEQ ID NO:14775, SEQ ID NO:14776, SEQ ID NO:14777, SEQ ID NO:14778, SEQ ID NO:14779, SEQ ID NO:14780, SEQ ID NO:14781, SEQ ID NO:14782, SEQ ID NO:14783, SEQ ID NO:14784, SEQ ID NO:14785, SEQ ID NO:14786, SEQ ID NO:14787, SEQ ID NO:14788, SEQ ID NO:14789, SEQ ID NO:14790, SEQ ID NO:14791, SEQ ID NO:14792, SEQ ID NO:14793, SEQ ID NO:14794, SEQ ID NO:14795, SEQ ID NO:14796, SEQ ID NO:14797, SEQ ID NO:14798, SEQ ID NO:14799, SEQ ID NO:14800, SEQ ID NO:14801, SEQ ID NO:14802, SEQ ID NO:14803, SEQ ID NO:14804, SEQ ID NO:14805, SEQ ID NO:14806, SEQ ID NO:14807, SEQ ID NO:14808, SEQ ID NO:14809, SEQ ID NO:14810, SEQ ID NO:14811, SEQ ID NO:14812, SEQ ID NO:14813, SEQ ID NO:14814, SEQ ID NO:14815, SEQ ID NO:14816, SEQ ID NO:14817, SEQ ID NO:14818, SEQ ID NO:14819, SEQ ID NO:14820, SEQ ID NO:14821, SEQ ID NO:14822, SEQ ID NO:14823, SEQ ID NO:14824, SEQ ID NO:14825, SEQ ID NO:14826, SEQ ID NO:14827, SEQ ID NO:14828, SEQ ID NO:14829, SEQ ID NO:14830, SEQ ID NO:14831, SEQ ID NO:14832, SEQ ID NO:14833, SEQ ID NO:14834, SEQ ID NO:14835, SEQ ID NO:14836, SEQ ID NO:14837, SEQ ID NO:14838, SEQ ID NO:14839, SEQ ID NO:14840, SEQ ID NO:14841, SEQ ID NO:14842, SEQ ID NO:14843, SEQ ID NO:14844, SEQ ID NO:14845, SEQ ID NO:14846, SEQ ID NO:14847, SEQ ID NO:14848, SEQ ID NO:14849, SEQ ID NO:14850, SEQ ID NO:14851, SEQ ID NO:14852, SEQ ID NO:14853, SEQ ID NO:14854, SEQ ID NO:14855, SEQ ID NO:14856, SEQ ID NO:14857, SEQ ID NO:14858, SEQ ID NO:14859, SEQ ID NO:14860, SEQ ID NO:14861, SEQ ID NO:14862, SEQ ID NO:14863, SEQ ID NO:14864, SEQ ID NO:14865, SEQ ID NO:14866, SEQ ID NO:14867, SEQ ID NO:14868, SEQ ID NO:14869, SEQ ID NO:14870, SEQ ID NO:14871, SEQ ID NO:14872, SEQ ID NO:14873, SEQ ID NO:14874, SEQ ID NO:14875, SEQ ID NO:14876, SEQ ID NO:14877, SEQ ID NO:14878, SEQ ID NO:14879, SEQ ID NO:14880, SEQ ID NO:14881, SEQ ID NO:14882, SEQ ID NO:14883, SEQ ID NO:14884, SEQ ID NO:14885, SEQ ID NO:14886, SEQ ID NO:14887, SEQ ID NO:14888, SEQ ID NO:14889, SEQ ID NO:14890, SEQ ID NO:14891, SEQ ID NO:14892, SEQ ID NO:14893, SEQ ID NO:14894, SEQ ID NO:14895, SEQ ID NO:14896, SEQ ID NO:14897, SEQ ID NO:14898, SEQ ID NO:14899, SEQ ID NO:14900, SEQ ID NO:14901, SEQ ID NO:14902, SEQ ID NO:14903, SEQ ID NO:14904, SEQ ID NO:14905, SEQ ID NO:14906, SEQ ID NO:14907, SEQ ID NO:14908, SEQ ID NO:14909, SEQ ID NO:14910, SEQ ID NO:14911, SEQ ID NO:14912, SEQ ID NO:14913, SEQ ID NO:14914, SEQ ID NO:14915, SEQ ID NO:14916, SEQ ID NO:14917, SEQ ID NO:14918, SEQ ID NO:14919, SEQ ID NO:14920, SEQ ID NO:14921, SEQ ID NO:14922, SEQ ID NO:14923, SEQ ID NO:14924, SEQ ID NO:14925, SEQ ID NO:14926, SEQ ID NO:14927, SEQ ID NO:14928, SEQ ID NO:14929, SEQ ID NO:14930, SEQ ID NO:14931, SEQ ID NO:14932, SEQ ID NO:14933, SEQ ID NO:14934, SEQ ID NO:14935, SEQ ID NO:14936, SEQ ID NO:14937, SEQ ID NO:14938, SEQ ID NO:14939, SEQ ID NO:14940, SEQ ID NO:14941, SEQ ID NO:14942, SEQ ID NO:14943, SEQ ID NO:14944, SEQ ID NO:14945, SEQ ID NO:14946, SEQ ID NO:14947, SEQ ID NO:14948, SEQ ID NO:14949, SEQ ID NO:14950, SEQ ID NO:14951, SEQ ID NO:14952, SEQ ID NO:14953, SEQ ID NO:14954, SEQ ID NO:14955, SEQ ID NO:14956, SEQ ID NO:14957, SEQ ID NO:14958, SEQ ID NO:14959, SEQ ID NO:14960, SEQ ID NO:14961, SEQ ID NO:14962, SEQ ID NO:14963, SEQ ID NO:14964, SEQ ID NO:14965, SEQ ID NO:14966, SEQ ID NO:14967, SEQ ID NO:14968, SEQ ID NO:14969, SEQ ID NO:14970, SEQ ID NO:14971, SEQ ID NO:14972, SEQ ID NO:14973, SEQ ID NO:14974, SEQ ID NO:14975, SEQ ID NO:14976, SEQ ID NO:14977, SEQ ID NO:14978, SEQ ID NO:14979, SEQ ID NO:14980, SEQ ID NO:14981, SEQ ID NO:14982, SEQ ID NO:14983, SEQ ID NO:14984, SEQ ID NO:14985, SEQ ID NO:14986, SEQ ID NO:14987, SEQ ID NO:14988, SEQ ID NO:14989, SEQ ID NO:14990, SEQ ID NO:14991, SEQ ID NO:14992, SEQ ID NO:14993, SEQ ID NO:14994, SEQ ID NO:14995, SEQ ID NO:14996, SEQ ID NO:14997, SEQ ID NO:14998, SEQ ID NO:14999, SEQ ID NO:15000, SEQ ID NO:15001, SEQ ID NO:15002, SEQ ID NO:15003, SEQ ID NO:15004, SEQ ID NO:15005, SEQ ID NO:15006, SEQ ID NO:15007, SEQ ID NO:15008, SEQ ID NO:15009, SEQ ID NO:15010, SEQ ID NO:15011, SEQ ID NO:15012, SEQ ID NO:15013, SEQ ID NO:15014, SEQ ID NO:15015, SEQ ID NO:15016, SEQ ID NO:15017, SEQ ID NO:15018, SEQ ID NO:15019, SEQ ID NO:15020, SEQ ID NO:15021, SEQ ID NO:15022, SEQ ID NO:15023, SEQ ID NO:15024, SEQ ID NO:15025, SEQ ID NO:15026, SEQ ID NO:15027, SEQ ID NO:15028, SEQ ID NO:15029, SEQ ID NO:15030, SEQ ID NO:15031, SEQ ID NO:15032, SEQ ID NO:15033, SEQ ID NO:15034, SEQ ID NO:15035, SEQ ID NO:15036, SEQ ID NO:15037, SEQ ID NO:15038, SEQ ID NO:15039, SEQ ID NO:15040, SEQ ID NO:15041, SEQ ID NO:15042, SEQ ID NO:15043, SEQ ID NO:15044, SEQ ID NO:15045, SEQ ID NO:15046, SEQ ID NO:15047, SEQ ID NO:15048, SEQ ID NO:15049, SEQ ID NO:15050, SEQ ID NO:15051, SEQ ID NO:15052, SEQ ID NO:15053, SEQ ID NO:15054, SEQ ID NO:15055, SEQ ID NO:15056, SEQ ID NO:15057, SEQ ID NO:15058, SEQ ID NO:15059, SEQ ID NO:15060, SEQ ID NO:15061, SEQ ID NO:15062, SEQ ID NO:15063, SEQ ID NO:15064, SEQ ID NO:15065, SEQ ID NO:15066, SEQ ID NO:15067, SEQ ID NO:15068, SEQ ID NO:15069, SEQ ID NO:15070, SEQ ID NO:15071, SEQ ID NO:15072, SEQ ID NO:15073, SEQ ID NO:15074, SEQ ID NO:15075, SEQ ID NO:15076, SEQ ID NO:15077, SEQ ID NO:15078, SEQ ID NO:15079, SEQ ID NO:15080, SEQ ID NO:15081, SEQ ID NO:15082, SEQ ID NO:15083, SEQ ID NO:15084, SEQ ID NO:15085, SEQ ID NO:15086, SEQ ID NO:15087, SEQ ID NO:15088, SEQ ID NO:15089, SEQ ID NO:15090, SEQ ID NO:15091, SEQ ID NO:15092, SEQ ID NO:15093, SEQ ID NO:15094, SEQ ID NO:15095, SEQ ID NO:15096, SEQ ID NO:15097, SEQ ID NO:15098, SEQ ID NO:15099, SEQ ID NO:15100, SEQ ID NO:15101, SEQ ID NO:15102, SEQ ID NO:15103, SEQ ID NO:15104, SEQ ID NO:15105, SEQ ID NO:15106, SEQ ID NO:15107, SEQ ID NO:15108, SEQ ID NO:15109, SEQ ID NO:15110, SEQ ID NO:15111, SEQ ID NO:15112, SEQ ID NO:15113, SEQ ID NO:15114, SEQ ID NO:15115, SEQ ID NO:15116, SEQ ID NO:15117, SEQ ID NO:15118, SEQ ID NO:15119, SEQ ID NO:15120, SEQ ID NO:15121, SEQ ID NO:15122, SEQ ID NO:15123, SEQ ID NO:15124, SEQ ID NO:15125, SEQ ID NO:15126, SEQ ID NO:15127, SEQ ID NO:15128, SEQ ID NO:15129, SEQ ID NO:15130, SEQ ID NO:15131, SEQ ID NO:15132, SEQ ID NO:15133, SEQ ID NO:15134, SEQ ID NO:15135, SEQ ID NO:15136, SEQ ID NO:15137, SEQ ID NO:15138, SEQ ID NO:15139, SEQ ID NO:15140, SEQ ID NO:15141, SEQ ID NO:15142, SEQ ID NO:15143, SEQ ID NO:15144, SEQ ID NO:15145, SEQ ID NO:15146, SEQ ID NO:15147, SEQ ID NO:15148, SEQ ID NO:15149, SEQ ID NO:15150, SEQ ID NO:15151, SEQ ID NO:15152, SEQ ID NO:15153, SEQ ID NO:15154, SEQ ID NO:15155, SEQ ID NO:15156, SEQ ID NO:15157, SEQ ID NO:15158, SEQ ID NO:15159, SEQ ID NO:15160, SEQ ID NO:15161, SEQ ID NO:15162, SEQ ID NO:15163, SEQ ID NO:15164, SEQ ID NO:15165, SEQ ID NO:15166, SEQ ID NO:15167, SEQ ID NO:15168, SEQ ID NO:15169, SEQ ID NO:15170, SEQ ID NO:15171, SEQ ID NO:15172, SEQ ID NO:15173, SEQ ID NO:15174, SEQ ID NO:15175, SEQ ID NO:15176, SEQ ID NO:15177, SEQ ID NO:15178, SEQ ID NO:15179, SEQ ID NO:15180, SEQ ID NO:15181, SEQ ID NO:15182, SEQ ID NO:15183, SEQ ID NO:15184, SEQ ID NO:15185, SEQ ID NO:15186, SEQ ID NO:15187, SEQ ID NO:15188, SEQ ID NO:15189, SEQ ID NO:15190, SEQ ID NO:15191, SEQ ID NO:15192, SEQ ID NO:15193, SEQ ID NO:15194, SEQ ID NO:15195, SEQ ID NO:15196, SEQ ID NO:15197, SEQ ID NO:15198, SEQ ID NO:15199, SEQ ID NO:15200, SEQ ID NO:15201, SEQ ID NO:15202, SEQ ID NO:15203, SEQ ID NO:15204, SEQ ID NO:15205, SEQ ID NO:15206, SEQ ID NO:15207, SEQ ID NO:15208, SEQ ID NO:15209, SEQ ID NO:15210, SEQ ID NO:15211, SEQ ID NO:15212, SEQ ID NO:15213, SEQ ID NO:15214, SEQ ID NO:15215, SEQ ID NO:15216, SEQ ID NO:15217, SEQ ID NO:15218, SEQ ID NO:15219, SEQ ID NO:15220, SEQ ID NO:15221, SEQ ID NO:15222, SEQ ID NO:15223, SEQ ID NO:15224, SEQ ID NO:15225, SEQ ID NO:15226, SEQ ID NO:15227, SEQ ID NO:15228, SEQ ID NO:15229, SEQ ID NO:15230, SEQ ID NO:15231, SEQ ID NO:15232, SEQ ID NO:15233, SEQ ID NO:15234, SEQ ID NO:15235, SEQ ID NO:15236, SEQ ID NO:15237, SEQ ID NO:15238, SEQ ID NO:15239, SEQ ID NO:15240, SEQ ID NO:15241, SEQ ID NO:15242, SEQ ID NO:15243, SEQ ID NO:15244, SEQ ID NO:15245, SEQ ID NO:15246, SEQ ID NO:15247, SEQ ID NO:15248, SEQ ID NO:15249, SEQ ID NO:15250, SEQ ID NO:15251, SEQ ID NO:15252, SEQ ID NO:15253, SEQ ID NO:15254, SEQ ID NO:15255, SEQ ID NO:15256, SEQ ID NO:15257, SEQ ID NO:15258, SEQ ID NO:15259, SEQ ID NO:15260, SEQ ID NO:15261, SEQ ID NO:15262, SEQ ID NO:15263, SEQ ID NO:15264, SEQ ID NO:15265, SEQ ID NO:15266, SEQ ID NO:15267, SEQ ID NO:15268, SEQ ID NO:15269, SEQ ID NO:15270, SEQ ID NO:15271, SEQ ID NO:15272, SEQ ID NO:15273, SEQ ID NO:15274, SEQ ID NO:15275, SEQ ID NO:15276, SEQ ID NO:15277, SEQ ID NO:15278, SEQ ID NO:15279, SEQ ID NO:15280, SEQ ID NO:15281, SEQ ID NO:15282, SEQ ID NO:15283, SEQ ID NO:15284, SEQ ID NO:15285, SEQ ID NO:15286, SEQ ID NO:15287, SEQ ID NO:15288, SEQ ID NO:15289, SEQ ID NO:15290, SEQ ID NO:15291, SEQ ID NO:15292, SEQ ID NO:15293, SEQ ID NO:15294, SEQ ID NO:15295, SEQ ID NO:15296, SEQ ID NO:15297, SEQ ID NO:15298, SEQ ID NO:15299, SEQ ID NO:15300, SEQ ID NO:15301, SEQ ID NO:15302, SEQ ID NO:15303, SEQ ID NO:15304, SEQ ID NO:15305, SEQ ID NO:15306, SEQ ID NO:15307, SEQ ID NO:15308, SEQ ID NO:15309, SEQ ID NO:15310, SEQ ID NO:15311, SEQ ID NO:15312, SEQ ID NO:15313, SEQ ID NO:15314, SEQ ID NO:15315, SEQ ID NO:15316, SEQ ID NO:15317, SEQ ID NO:15318, SEQ ID NO:15319, SEQ ID NO:15320, SEQ ID NO:15321, SEQ ID NO:15322, SEQ ID NO:15323, SEQ ID NO:15324, SEQ ID NO:15325, SEQ ID NO:15326, SEQ ID NO:15327, SEQ ID NO:15328, SEQ ID NO:15329, SEQ ID NO:15330, SEQ ID NO:15331, SEQ ID NO:15332, SEQ ID NO:15333, SEQ ID NO:15334, SEQ ID NO:15335, SEQ ID NO:15336, SEQ ID NO:15337, SEQ ID NO:15338, SEQ ID NO:15339, SEQ ID NO:15340, SEQ ID NO:15341, SEQ ID NO:15342, SEQ ID NO:15343, SEQ ID NO:15344, SEQ ID NO:15345, SEQ ID NO:15346, SEQ ID NO:15347, SEQ ID NO:15348, SEQ ID NO:15349, SEQ ID NO:15350, SEQ ID NO:15351, SEQ ID NO:15352, SEQ ID NO:15353, SEQ ID NO:15354, SEQ ID NO:15355, SEQ ID NO:15356, SEQ ID NO:15357, SEQ ID NO:15358, SEQ ID NO:15359, SEQ ID NO:15360, SEQ ID NO:15361, SEQ ID NO:15362, SEQ ID NO:15363, SEQ ID NO:15364, SEQ ID NO:15365, SEQ ID NO:15366, SEQ ID NO:15367, SEQ ID NO:15368, SEQ ID NO:15369, SEQ ID NO:15370, SEQ ID NO:15371, SEQ ID NO:15372, SEQ ID NO:15373, SEQ ID NO:15374, SEQ ID NO:15375, SEQ ID NO:15376, SEQ ID NO:15377, SEQ ID NO:15378, SEQ ID NO:15379, SEQ ID NO:15380, SEQ ID NO:15381, SEQ ID NO:15382, SEQ ID NO:15383, SEQ ID NO:15384, SEQ ID NO:15385, SEQ ID NO:15386, SEQ ID NO:15387, SEQ ID NO:15388, SEQ ID NO:15389, SEQ ID NO:15390, SEQ ID NO:15391, SEQ ID NO:15392, SEQ ID NO:15393, SEQ ID NO:15394, SEQ ID NO:15395, SEQ ID NO:15396, SEQ ID NO:15397, SEQ ID NO:15398, SEQ ID NO:15399, SEQ ID NO:15400, SEQ ID NO:15401, SEQ ID NO:15402, SEQ ID NO:15403, SEQ ID NO:15404, SEQ ID NO:15405, SEQ ID NO:15406, SEQ ID NO:15407, SEQ ID NO:15408, SEQ ID NO:15409, SEQ ID NO:15410, SEQ ID NO:15411, SEQ ID NO:15412, SEQ ID NO:15413, SEQ ID NO:15414, SEQ ID NO:15415, SEQ ID NO:15416, SEQ ID NO:15417, SEQ ID NO:15418, SEQ ID NO:15419, SEQ ID NO:15420, SEQ ID NO:15421, SEQ ID NO:15422, SEQ ID NO:15423, SEQ ID NO:15424, SEQ ID NO:15425, SEQ ID NO:15426, SEQ ID NO:15427, SEQ ID NO:15428, SEQ ID NO:15429, SEQ ID NO:15430, SEQ ID NO:15431, SEQ ID NO:15432, SEQ ID NO:15433, SEQ ID NO:15434, SEQ ID NO:15435, SEQ ID NO:15436, SEQ ID NO:15437, SEQ ID NO:15438, SEQ ID NO:15439, SEQ ID NO:15440, SEQ ID NO:15441, SEQ ID NO:15442, SEQ ID NO:15443, SEQ ID NO:15444, SEQ ID NO:15445, SEQ ID NO:15446, SEQ ID NO:15447, SEQ ID NO:15448, SEQ ID NO:15449, SEQ ID NO:15450, SEQ ID NO:15451, SEQ ID NO:15452, SEQ ID NO:15453, SEQ ID NO:15454, SEQ ID NO:15455, SEQ ID NO:15456, SEQ ID NO:15457, SEQ ID NO:15458, SEQ ID NO:15459, SEQ ID NO:15460, SEQ ID NO:15461, SEQ ID NO:15462, SEQ ID NO:15463, SEQ ID NO:15464, SEQ ID NO:15465, SEQ ID NO:15466, SEQ ID NO:15467, SEQ ID NO:15468, SEQ ID NO:15469, SEQ ID NO:15470, SEQ ID NO:15471, SEQ ID NO:15472, SEQ ID NO:15473, SEQ ID NO:15474, SEQ ID NO:15475, SEQ ID NO:15476, SEQ ID NO:15477, SEQ ID NO:15478, SEQ ID NO:15479, SEQ ID NO:15480, SEQ ID NO:15481, SEQ ID NO:15482, SEQ ID NO:15483, SEQ ID NO:15484, SEQ ID NO:15485, SEQ ID NO:15486, SEQ ID NO:15487, SEQ ID NO:15488, SEQ ID NO:15489, SEQ ID NO:15490, SEQ ID NO:15491, SEQ ID NO:15492, SEQ ID NO:15493, SEQ ID NO:15494, SEQ ID NO:15495, SEQ ID NO:15496, SEQ ID NO:15497, SEQ ID NO:15498, SEQ ID NO:15499, SEQ ID NO:15500, SEQ ID NO:15501, SEQ ID NO:15502, SEQ ID NO:15503, SEQ ID NO:15504, SEQ ID NO:15505, SEQ ID NO:15506, SEQ ID NO:15507, SEQ ID NO:15508, SEQ ID NO:15509, SEQ ID NO:15510, SEQ ID NO:15511, SEQ ID NO:15512, SEQ ID NO:15513, SEQ ID NO:15514, SEQ ID NO:15515, SEQ ID NO:15516, SEQ ID NO:15517, SEQ ID NO:15518, SEQ ID NO:15519, SEQ ID NO:15520, SEQ ID NO:15521, SEQ ID NO:15522, SEQ ID NO:15523, SEQ ID NO:15524, SEQ ID NO:15525, SEQ ID NO:15526, SEQ ID NO:15527, SEQ ID NO:15528, SEQ ID NO:15529, SEQ ID NO:15530, SEQ ID NO:15531, SEQ ID NO:15532, SEQ ID NO:15533, SEQ ID NO:15534, SEQ ID NO:15535, SEQ ID NO:15536, SEQ ID NO:15537, SEQ ID NO:15538, or SEQ ID NO:15539.

[0084] In embodiments, the oligonucleotide probe includes a sequence at least 80%, 85%, 90%, 95%, 98%, 99%, or 100% identical to: SEQ ID NO:11428, SEQ ID NO:11429, SEQ ID NO:11430, SEQ ID NO:11431, SEQ ID NO:11432, SEQ ID NO:11433, SEQ ID NO:11434, SEQ ID NO:11435, SEQ ID NO:11436, SEQ ID NO:11437, SEQ ID NO:11438, SEQ ID NO:11439, SEQ ID NO:11440, SEQ ID NO:11441, SEQ ID NO:11442, SEQ ID NO:11443, SEQ ID NO:11444, SEQ ID NO:11445, SEQ ID NO:11446, SEQ ID NO:11447, SEQ ID NO:11448, SEQ ID NO:11449, SEQ ID NO:11450, SEQ ID NO:11451, SEQ ID NO:11452, SEQ ID NO:11453, SEQ ID NO:11454, SEQ ID NO:11455, SEQ ID NO:11456, SEQ ID NO:11457, SEQ ID NO:11458, SEQ ID NO:11459, SEQ ID NO:11460, SEQ ID NO:11461, SEQ ID NO:11462, SEQ ID NO:11463, SEQ ID NO:11464, SEQ ID NO:11465, SEQ ID NO:11466, SEQ ID NO:11467, SEQ ID NO:11468, SEQ ID NO:11469, SEQ ID NO:11470, SEQ ID NO:11471, SEQ ID NO:11472, SEQ ID NO:11473, SEQ ID NO:11474, SEQ ID NO:11475, SEQ ID NO:11476, SEQ ID NO:11477, SEQ ID NO:11478, SEQ ID NO:11479, SEQ ID NO:11480, SEQ ID NO:11481, SEQ ID NO:11482, SEQ ID NO:11483, SEQ ID NO:11484, SEQ ID NO:11485, SEQ ID NO:11486, SEQ ID NO:11487, SEQ ID NO:11488, SEQ ID NO:11489, SEQ ID NO:11490, SEQ ID NO:11491, SEQ ID NO:11492, SEQ ID NO:11493, SEQ ID NO:11494, SEQ ID NO:11495, SEQ ID NO:11496, SEQ ID NO:11497, SEQ ID NO:11498, SEQ ID NO:11499, SEQ ID NO:11500, SEQ ID NO:11501, SEQ ID NO:11502, SEQ ID NO:11503, SEQ ID NO:11504, SEQ ID NO:11505, SEQ ID NO:11506, SEQ ID NO:11507, SEQ ID NO:11508, SEQ ID NO:11509, SEQ ID NO:11510, SEQ ID NO:11511, SEQ ID NO:11512, SEQ ID NO:11513, SEQ ID NO:11514, SEQ ID NO:11515, SEQ ID NO:11516, SEQ ID NO:11517, SEQ ID NO:11518, SEQ ID NO:11519, SEQ ID NO:11520, SEQ ID NO:11521, SEQ ID NO:11522, SEQ ID NO:11523, SEQ ID NO:11524, SEQ ID NO:11525, SEQ ID NO:11526, SEQ ID NO:11527, SEQ ID NO:11528, SEQ ID NO:11529, SEQ ID NO:11530, SEQ ID NO:11531, SEQ ID NO:11532, SEQ ID NO:11533, SEQ ID NO:11534, SEQ ID NO:11535, SEQ ID NO:11536, SEQ ID NO:11537, SEQ ID NO:11538, SEQ ID NO:11539, SEQ ID NO:11540, SEQ ID NO:11541, SEQ ID NO:11542, SEQ ID NO:11543, SEQ ID NO:11544, SEQ ID NO:11545, SEQ ID NO:11546, SEQ ID NO:11547, SEQ ID NO:11548, SEQ ID NO:11549, SEQ ID NO:11550, SEQ ID NO:11551, SEQ ID NO:11552, SEQ ID NO:11553, SEQ ID NO:11554, SEQ ID NO:11555, SEQ ID NO:11556, SEQ ID NO:11557, SEQ ID NO:11558, SEQ ID NO:11559, SEQ ID NO:11560, SEQ ID NO:11561, SEQ ID NO:11562, SEQ ID NO:11563, SEQ ID NO:11564, SEQ ID NO:11565, SEQ ID NO:11566, SEQ ID NO:11567, SEQ ID NO:11568, SEQ ID NO:11569, SEQ ID NO:11570, SEQ ID NO:11571, SEQ ID NO:11572, SEQ ID NO:11573, SEQ ID NO:11574, SEQ ID NO:11575, SEQ ID NO:11576, SEQ ID NO:11577, SEQ ID NO:11578, SEQ ID NO:11579, SEQ ID NO:11580, SEQ ID NO:11581, SEQ ID NO:11582, SEQ ID NO:11583, SEQ ID NO:11584, SEQ ID NO:11585, SEQ ID NO:11586, SEQ ID NO:11587, SEQ ID NO:11588, SEQ ID NO:11589, SEQ ID NO:11590, SEQ ID NO:11591, SEQ ID NO:11592, SEQ ID NO:11593, SEQ ID NO:11594, SEQ ID NO:11595, SEQ ID NO:11596, SEQ ID NO:11597, SEQ ID NO:11598, SEQ ID NO:11599, SEQ ID NO:11600, SEQ ID NO:11601, SEQ ID NO:11602, SEQ ID NO:11603, SEQ ID NO:11604, SEQ ID NO:11605, SEQ ID NO:11606, SEQ ID NO:11607, SEQ ID NO:11608, SEQ ID NO:11609, SEQ ID NO:11610, SEQ ID NO:11611, SEQ ID NO:11612, SEQ ID NO:11613, SEQ ID NO:11614, SEQ ID NO:11615, SEQ ID NO:11616, SEQ ID NO:11617, SEQ ID NO:11618, SEQ ID NO:11619, SEQ ID NO:11620, SEQ ID NO:11621, SEQ ID NO:11622, SEQ ID NO:11623, SEQ ID NO:11624, SEQ ID NO:11625, SEQ ID NO:11626, SEQ ID NO:11627, SEQ ID NO:11628, SEQ ID NO:11629, SEQ ID NO:11630, SEQ ID NO:11631, SEQ ID NO:11632, SEQ ID NO:11633, SEQ ID NO:11634, SEQ ID NO:11635, SEQ ID NO:11636, SEQ ID NO:11637, SEQ ID NO:11638, SEQ ID NO:11639, SEQ ID NO:11640, SEQ ID NO:11641, SEQ ID NO:11642, SEQ ID NO:11643, SEQ ID NO:11644, SEQ ID NO:11645, SEQ ID NO:11646, SEQ ID NO:11647, SEQ ID NO:11648, SEQ ID NO:11649, SEQ ID NO:11650, SEQ ID NO:11651, SEQ ID NO:11652, SEQ ID NO:11653, SEQ ID NO:11654, SEQ ID NO:11655, SEQ ID NO:11656, SEQ ID NO:11657, SEQ ID NO:11658, SEQ ID NO:11659, SEQ ID NO:11660, SEQ ID NO:11661, SEQ ID NO:11662, SEQ ID NO:11663, SEQ ID NO:11664, SEQ ID NO:11665, SEQ ID NO:11666, SEQ ID NO:11667, SEQ ID NO:11668, SEQ ID NO:11669, SEQ ID NO:11670, SEQ ID NO:11671, SEQ ID NO:11672, SEQ ID NO:11673, SEQ ID NO:11674, SEQ ID NO:11675, SEQ ID NO:11676, SEQ ID NO:11677, SEQ ID NO:11678, SEQ ID NO:11679, SEQ ID NO:11680, SEQ ID NO:11681, SEQ ID NO:11682, SEQ ID NO:11683, SEQ ID NO:11684, SEQ ID NO:11685, SEQ ID NO:11686, SEQ ID NO:11687, SEQ ID NO:11688, SEQ ID NO:11689, SEQ ID NO:11690, SEQ ID NO:11691, SEQ ID NO:11692, SEQ ID NO:11693, SEQ ID NO:11694, SEQ ID NO:11695, SEQ ID NO:11696, SEQ ID NO:11697, SEQ ID NO:11698, SEQ ID NO:11699, SEQ ID NO:11700, SEQ ID NO:11701, SEQ ID NO:11702, SEQ ID NO:11703, SEQ ID NO:11704, SEQ ID NO:11705, SEQ ID NO:11706, SEQ ID NO:11707, SEQ ID NO:11708, SEQ ID NO:11709, SEQ ID NO:11710, SEQ ID NO:11711, SEQ ID NO:11712, SEQ ID NO:11713, SEQ ID NO:11714, SEQ ID NO:11715, SEQ ID NO:11716, SEQ ID NO:11717, SEQ ID NO:11718, SEQ ID NO:11719, SEQ ID NO:11720, SEQ ID NO:11721, SEQ ID NO:11722, SEQ ID NO:11723, SEQ ID NO:11724, SEQ ID NO:11725, SEQ ID NO:11726, SEQ ID NO:11727, SEQ ID NO:11728, SEQ ID NO:11729, SEQ ID NO:11730, SEQ ID NO:11731, SEQ ID NO:11732, SEQ ID NO:11733, SEQ ID NO:11734, SEQ ID NO:11735, SEQ ID NO:11736, SEQ ID NO:11737, SEQ ID NO:11738, SEQ ID NO:11739, SEQ ID NO:11740, SEQ ID NO:11741, SEQ ID NO:11742, SEQ ID NO:11743, SEQ ID NO:11744, SEQ ID NO:11745, SEQ ID NO:11746, SEQ ID NO:11747, SEQ ID NO:11748, SEQ ID NO:11749, SEQ ID NO:11750, SEQ ID NO:11751, SEQ ID NO:11752, SEQ ID NO:11753, SEQ ID NO:11754, SEQ ID NO:11755, SEQ ID NO:11756, SEQ ID NO:11757, SEQ ID NO:11758, SEQ ID NO:11759, SEQ ID NO:11760, SEQ ID NO:11761, SEQ ID NO:11762, SEQ ID NO:11763, SEQ ID NO:11764, SEQ ID NO:11765, SEQ ID NO:11766, SEQ ID NO:11767, SEQ ID NO:11768, SEQ ID NO:11769, SEQ ID NO:11770, SEQ ID NO:11771, SEQ ID NO:11772, SEQ ID NO:11773, SEQ ID NO:11774, SEQ ID NO:11775, SEQ ID NO:11776, SEQ ID NO:11777, SEQ ID NO:11778, SEQ ID NO:11779, SEQ ID NO:11780, SEQ ID NO:11781, SEQ ID NO:11782, SEQ ID NO:11783, SEQ ID NO:11784, SEQ ID NO:11785, SEQ ID NO:11786, SEQ ID NO:11787, SEQ ID NO:11788, SEQ ID NO:11789, SEQ ID NO:11790, SEQ ID NO:11791, SEQ ID NO:11792, SEQ ID NO:11793, SEQ ID NO:11794, SEQ ID NO:11795, SEQ ID NO:11796, SEQ ID NO:11797, SEQ ID NO:11798, SEQ ID NO:11799, SEQ ID NO:11800, SEQ ID NO:11801, SEQ ID NO:11802, SEQ ID NO:11803, SEQ ID NO:11804, SEQ ID NO:11805, SEQ ID NO:11806, SEQ ID NO:11807, SEQ ID NO:11808, SEQ ID NO:11809, SEQ ID NO:11810, SEQ ID NO:11811, SEQ ID NO:11812, SEQ ID NO:11813, SEQ ID NO:11814, SEQ ID NO:11815, SEQ ID NO:11816, SEQ ID NO:11817, SEQ ID NO:11818, SEQ ID NO:11819, SEQ ID NO:11820, SEQ ID NO:11821, SEQ ID NO:11822, SEQ ID NO:11823, SEQ ID NO:11824, SEQ ID NO:11825, SEQ ID NO:11826, SEQ ID NO:11827, SEQ ID NO:11828, SEQ ID NO:11829, SEQ ID NO:11830, SEQ ID NO:11831, SEQ ID NO:11832, SEQ ID NO:11833, SEQ ID NO:11834, SEQ ID NO:11835, SEQ ID NO:11836, SEQ ID NO:11837, SEQ ID NO:11838, SEQ ID NO:11839, SEQ ID NO:11840, SEQ ID NO:11841, SEQ ID NO:11842, SEQ ID NO:11843, SEQ ID NO:11844, SEQ ID NO:11845, SEQ ID NO:11846, SEQ ID NO:11847, SEQ ID NO:11848, SEQ ID NO:11849, SEQ ID NO:11850, SEQ ID NO:11851, SEQ ID NO:11852, SEQ ID NO:11853, SEQ ID NO:11854, SEQ ID NO:11855, SEQ ID NO:11856, SEQ ID NO:11857, SEQ ID NO:11858, SEQ ID NO:11859, SEQ ID NO:11860, SEQ ID NO:11861, SEQ ID NO:11862, SEQ ID NO:11863, SEQ ID NO:11864, SEQ ID NO:11865, SEQ ID NO:11866, SEQ ID NO:11867, SEQ ID NO:11868, SEQ ID NO:11869, SEQ ID NO:11870, SEQ ID NO:11871, SEQ ID NO:11872, SEQ ID NO:11873, SEQ ID NO:11874, SEQ ID NO:11875, SEQ ID NO:11876, SEQ ID NO:11877, SEQ ID NO:11878, SEQ ID NO:11879, SEQ ID NO:11880, SEQ ID NO:11881, SEQ ID NO:11882, SEQ ID NO:11883, SEQ ID NO:11884, SEQ ID NO:11885, SEQ ID NO:11886, SEQ ID NO:11887, SEQ ID NO:11888, SEQ ID NO:11889, SEQ ID NO:11890, SEQ ID NO:11891, SEQ ID NO:11892, SEQ ID NO:11893, SEQ ID NO:11894, SEQ ID NO:11895, SEQ ID NO:11896, SEQ ID NO:11897, SEQ ID NO:11898, SEQ ID NO:11899, SEQ ID NO:11900, SEQ ID NO:11901, SEQ ID NO:11902, SEQ ID NO:11903, SEQ ID NO:11904, SEQ ID NO:11905, SEQ ID NO:11906, SEQ ID NO:11907, SEQ ID NO:11908, SEQ ID NO:11909, SEQ ID NO:11910, SEQ ID NO:11911, SEQ ID NO:11912, SEQ ID NO:11913, SEQ ID NO:11914, SEQ ID NO:11915, SEQ ID NO:11916, SEQ ID NO:11917, SEQ ID NO:11918, SEQ ID NO:11919, SEQ ID NO:11920, SEQ ID NO:11921, SEQ ID NO:11922, SEQ ID NO:11923, SEQ ID NO:11924, SEQ ID NO:11925, SEQ ID NO:11926, SEQ ID NO:11927, SEQ ID NO:11928, SEQ ID NO:11929, SEQ ID NO:11930, SEQ ID NO:11931, SEQ ID NO:11932, SEQ ID NO:11933, SEQ ID NO:11934, SEQ ID NO:11935, SEQ ID NO:11936, SEQ ID NO:11937, SEQ ID NO:11938, SEQ ID NO:11939, SEQ ID NO:11940, SEQ ID NO:11941, SEQ ID NO:11942, SEQ ID NO:11943, SEQ ID NO:11944, SEQ ID NO:11945, SEQ ID NO:11946, SEQ ID NO:11947, SEQ ID NO:11948, SEQ ID NO:11949, SEQ ID NO:11950, SEQ ID NO:11951, SEQ ID NO:11952, SEQ ID NO:11953, SEQ ID NO:11954, SEQ ID NO:11955, SEQ ID NO:11956, SEQ ID NO:11957, SEQ ID NO:11958, SEQ ID NO:11959, SEQ ID NO:11960, SEQ ID NO:11961, SEQ ID NO:11962, SEQ ID NO:11963, SEQ ID NO:11964, SEQ ID NO:11965, SEQ ID NO:11966, SEQ ID NO:11967, SEQ ID NO:11968, SEQ ID NO:11969, SEQ ID NO:11970, SEQ ID NO:11971, SEQ ID NO:11972, SEQ ID NO:11973, SEQ ID NO:11974, SEQ ID NO:11975, SEQ ID NO:11976, SEQ ID NO:11977, SEQ ID NO:11978, SEQ ID NO:11979, SEQ ID NO:11980, SEQ ID NO:11981, SEQ ID NO:11982, SEQ ID NO:11983, SEQ ID NO:11984, SEQ ID NO:11985, SEQ ID NO:11986, SEQ ID NO:11987, SEQ ID NO:11988, SEQ ID NO:11989, SEQ ID NO:11990, SEQ ID NO:11991, SEQ ID NO:11992, SEQ ID NO:11993, SEQ ID NO:11994, SEQ ID NO:11995, SEQ ID NO:11996, SEQ ID NO:11997, SEQ ID NO:11998, SEQ ID NO:11999, SEQ ID NO:12000, SEQ ID NO:12001, SEQ ID NO:12002, SEQ ID NO:12003, SEQ ID NO:12004, SEQ ID NO:12005, SEQ ID NO:12006, SEQ ID NO:12007, SEQ ID NO:12008, SEQ ID NO:12009, SEQ ID NO:12010, SEQ ID NO:12011, SEQ ID NO:12012, SEQ ID NO:12013, SEQ ID NO:12014, SEQ ID NO:12015, SEQ ID NO:12016, SEQ ID NO:12017, SEQ ID NO:12018, SEQ ID NO:12019, SEQ ID NO:12020, SEQ ID NO:12021, SEQ ID NO:12022, SEQ ID NO:12023, SEQ ID NO:12024, SEQ ID NO:12025, SEQ ID NO:12026, SEQ ID NO:12027, SEQ ID NO:12028, SEQ ID NO:12029, SEQ ID NO:12030, SEQ ID NO:12031, SEQ ID NO:12032, SEQ ID NO:12033, SEQ ID NO:12034, SEQ ID NO:12035, SEQ ID NO:12036, SEQ ID NO:12037, SEQ ID NO:12038, SEQ ID NO:12039, SEQ ID NO:12040, SEQ ID NO:12041, SEQ ID NO:12042, SEQ ID NO:12043, SEQ ID NO:12044, SEQ ID NO:12045, SEQ ID NO:12046, SEQ ID NO:12047, SEQ ID NO:12048, SEQ ID NO:12049, SEQ ID NO:12050, SEQ ID NO:12051, SEQ ID NO:12052, SEQ ID NO:12053, SEQ ID NO:12054, SEQ ID NO:12055, SEQ ID NO:12056, SEQ ID NO:12057, SEQ ID NO:12058, SEQ ID NO:12059, SEQ ID NO:12060, SEQ ID NO:12061, SEQ ID NO:12062, SEQ ID NO:12063, SEQ ID NO:12064, SEQ ID NO:12065, SEQ ID NO:12066, SEQ ID NO:12067, SEQ ID NO:12068, SEQ ID NO:12069, SEQ ID NO:12070, SEQ ID NO:12071, SEQ ID NO:12072, SEQ ID NO:12073, SEQ ID NO:12074, SEQ ID NO:12075, SEQ ID NO:12076, SEQ ID NO:12077, SEQ ID NO:12078, SEQ ID NO:12079, SEQ ID NO:12080, SEQ ID NO:12081, SEQ ID NO:12082, SEQ ID NO:12083, SEQ ID NO:12084, SEQ ID NO:12085, SEQ ID NO:12086, SEQ ID NO:12087, SEQ ID NO:12088, SEQ ID NO:12089, SEQ ID NO:12090, SEQ ID NO:12091, SEQ ID NO:12092, SEQ ID NO:12093, SEQ ID NO:12094, SEQ ID NO:12095, SEQ ID NO:12096, SEQ ID NO:12097, SEQ ID NO:12098, SEQ ID NO:12099, SEQ ID NO:12100, SEQ ID NO:12101, SEQ ID NO:12102, SEQ ID NO:12103, SEQ ID NO:12104, SEQ ID NO:12105, SEQ ID NO:12106, SEQ ID NO:12107, SEQ ID NO:12108, SEQ ID NO:12109, SEQ ID NO:12110, SEQ ID NO:12111, SEQ ID NO:12112, SEQ ID NO:12113, SEQ ID NO:12114, SEQ ID NO:12115, SEQ ID NO:12116, SEQ ID NO:12117, SEQ ID NO:12118, SEQ ID NO:12119, SEQ ID NO:12120, SEQ ID NO:12121, SEQ ID NO:12122, SEQ ID NO:12123, SEQ ID NO:12124, SEQ ID NO:12125, SEQ ID NO:12126, SEQ ID NO:12127, SEQ ID NO:12128, SEQ ID NO:12129, SEQ ID NO:12130, SEQ ID NO:12131, SEQ ID NO:12132, SEQ ID NO:12133, SEQ ID NO:12134, SEQ ID NO:12135, SEQ ID NO:12136, SEQ ID NO:12137, SEQ ID NO:12138, SEQ ID NO:12139, SEQ ID NO:12140, SEQ ID NO:12141, SEQ ID NO:12142, SEQ ID NO:12143, SEQ ID NO:12144, SEQ ID NO:12145, SEQ ID NO:12146, SEQ ID NO:12147, SEQ ID NO:12148, SEQ ID NO:12149, SEQ ID NO:12150, SEQ ID NO:12151, SEQ ID NO:12152, SEQ ID NO:12153, SEQ ID NO:12154, SEQ ID NO:12155, SEQ ID NO:12156, SEQ ID NO:12157, SEQ ID NO:12158, SEQ ID NO:12159, SEQ ID NO:12160, SEQ ID NO:12161, SEQ ID NO:12162, SEQ ID NO:12163, SEQ ID NO:12164, SEQ ID NO:12165, SEQ ID NO:12166, SEQ ID NO:12167, SEQ ID NO:12168, SEQ ID NO:12169, SEQ ID NO:12170, SEQ ID NO:12171, SEQ ID NO:12172, SEQ ID NO:12173, SEQ ID NO:12174, SEQ ID NO:12175, SEQ ID NO:12176, SEQ ID NO:12177, SEQ ID NO:12178, SEQ ID NO:12179, SEQ ID NO:12180, SEQ ID NO:12181, SEQ ID NO:12182, SEQ ID NO:12183, SEQ ID NO:12184, SEQ ID NO:12185, SEQ ID NO:12186, SEQ ID NO:12187, SEQ ID NO:12188, SEQ ID NO:12189, SEQ ID NO:12190, SEQ ID NO:12191, SEQ ID NO:12192, SEQ ID NO:12193, SEQ ID NO:12194, SEQ ID NO:12195, SEQ ID NO:12196, SEQ ID NO:12197, SEQ ID NO:12198, SEQ ID NO:12199, SEQ ID NO:12200, SEQ ID NO:12201, SEQ ID NO:12202, SEQ ID NO:12203, SEQ ID NO:12204, SEQ ID NO:12205, SEQ ID NO:12206, SEQ ID NO:12207, SEQ ID NO:12208, SEQ ID NO:12209, SEQ ID NO:12210, SEQ ID NO:12211, SEQ ID NO:12212, SEQ ID NO:12213, SEQ ID NO:12214, SEQ ID NO:12215, SEQ ID NO:12216, SEQ ID NO:12217, SEQ ID NO:12218, SEQ ID NO:12219, SEQ ID NO:12220, SEQ ID NO:12221, SEQ ID NO:12222, SEQ ID NO:12223, SEQ ID NO:12224, SEQ ID NO:12225, SEQ ID NO:12226, SEQ ID NO:12227, SEQ ID NO:12228, SEQ ID NO:12229, SEQ ID NO:12230, SEQ ID NO:12231, SEQ ID NO:12232, SEQ ID NO:12233, SEQ ID NO:12234, SEQ ID NO:12235, SEQ ID NO:12236, SEQ ID NO:12237, SEQ ID NO:12238, SEQ ID NO:12239, SEQ ID NO:12240, SEQ ID NO:12241, SEQ ID NO:12242, SEQ ID NO:12243, SEQ ID NO:12244, SEQ ID NO:12245, SEQ ID NO:12246, SEQ ID NO:12247, SEQ ID NO:12248, SEQ ID NO:12249, SEQ ID NO:12250, SEQ ID NO:12251, SEQ ID NO:12252, SEQ ID NO:12253, SEQ ID NO:12254, SEQ ID NO:12255, SEQ ID NO:12256, SEQ ID NO:12257, SEQ ID NO:12258, SEQ ID NO:12259, SEQ ID NO:12260, SEQ ID NO:12261, SEQ ID NO:12262, SEQ ID NO:12263, SEQ ID NO:12264, SEQ ID NO:12265, SEQ ID NO:12266, SEQ ID NO:12267, SEQ ID NO:12268, SEQ ID NO:12269, SEQ ID NO:12270, SEQ ID NO:12271, SEQ ID NO:12272, SEQ ID NO:12273, SEQ ID NO:12274, SEQ ID NO:12275, SEQ ID NO:12276, SEQ ID NO:12277, SEQ ID NO:12278, SEQ ID NO:12279, SEQ ID NO:12280, SEQ ID NO:12281, SEQ ID NO:12282, SEQ ID NO:12283, SEQ ID NO:12284, SEQ ID NO:12285, SEQ ID NO:12286, SEQ ID NO:12287, SEQ ID NO:12288, SEQ ID NO:12289, SEQ ID NO:12290, SEQ ID NO:12291, SEQ ID NO:12292, SEQ ID NO:12293, SEQ ID NO:12294, SEQ ID NO:12295, SEQ ID NO:12296, SEQ ID NO:12297, SEQ ID NO:12298, SEQ ID NO:12299, SEQ ID NO:12300, SEQ ID NO:12301, SEQ ID NO:12302, SEQ ID NO:12303, SEQ ID NO:12304, SEQ ID NO:12305, SEQ ID NO:12306, SEQ ID NO:12307, SEQ ID NO:12308, SEQ ID NO:12309, SEQ ID NO:12310, SEQ ID NO:12311, SEQ ID NO:12312, SEQ ID NO:12313, SEQ ID NO:12314, SEQ ID NO:12315, SEQ ID NO:12316, SEQ ID NO:12317, SEQ ID NO:12318, SEQ ID NO:12319, SEQ ID NO:12320, SEQ ID NO:12321, SEQ ID NO:12322, SEQ ID NO:12323, SEQ ID NO:12324, SEQ ID NO:12325, SEQ ID NO:12326, SEQ ID NO:12327, SEQ ID NO:12328, SEQ ID NO:12329, SEQ ID NO:12330, SEQ ID NO:12331, SEQ ID NO:12332, SEQ ID NO:12333, SEQ ID NO:12334, SEQ ID NO:12335, SEQ ID NO:12336, SEQ ID NO:12337, SEQ ID NO:12338, SEQ ID NO:12339, SEQ ID NO:12340, SEQ ID NO:12341, SEQ ID NO:12342, SEQ ID NO:12343, SEQ ID NO:12344, SEQ ID NO:12345, SEQ ID NO:12346, SEQ ID NO:12347, SEQ ID NO:12348, SEQ ID NO:12349, SEQ ID NO:12350, SEQ ID NO:12351, SEQ ID NO:12352, SEQ ID NO:12353, SEQ ID NO:12354, SEQ ID NO:12355, SEQ ID NO:12356, SEQ ID NO:12357, SEQ ID NO:12358, SEQ ID NO:12359, SEQ ID NO:12360, SEQ ID NO:12361, SEQ ID NO:12362, SEQ ID NO:12363, SEQ ID NO:12364, SEQ ID NO:12365, SEQ ID NO:12366, SEQ ID NO:12367, SEQ ID NO:12368, SEQ ID NO:12369, SEQ ID NO:12370, SEQ ID NO:12371, SEQ ID NO:12372, SEQ ID NO:12373, SEQ ID NO:12374, SEQ ID NO:12375, SEQ ID NO:12376, SEQ ID NO:12377, SEQ ID NO:12378, SEQ ID NO:12379, SEQ ID NO:12380, SEQ ID NO:12381, SEQ ID NO:12382, SEQ ID NO:12383, SEQ ID NO:12384, SEQ ID NO:12385, SEQ ID NO:12386, SEQ ID NO:12387, SEQ ID NO:12388, SEQ ID NO:12389, SEQ ID NO:12390, SEQ ID NO:12391, SEQ ID NO:12392, SEQ ID NO:12393, SEQ ID NO:12394, SEQ ID NO:12395, SEQ ID NO:12396, SEQ ID NO:12397, SEQ ID NO:12398, SEQ ID NO:12399, SEQ ID NO:12400, SEQ ID NO:12401, SEQ ID NO:12402, SEQ ID NO:12403, SEQ ID NO:12404, SEQ ID NO:12405, SEQ ID NO:12406, SEQ ID NO:12407, SEQ ID NO:12408, SEQ ID NO:12409, SEQ ID NO:12410, SEQ ID NO:12411, SEQ ID NO:12412, SEQ ID NO:12413, SEQ ID NO:12414, SEQ ID NO:12415, SEQ ID NO:12416, SEQ ID NO:12417, SEQ ID NO:12418, SEQ ID NO:12419, SEQ ID NO:12420, SEQ ID NO:12421, SEQ ID NO:12422, SEQ ID NO:12423, SEQ ID NO:12424, SEQ ID NO:12425, SEQ ID NO:12426, SEQ ID NO:12427, SEQ ID NO:12428, SEQ ID NO:12429, SEQ ID NO:12430, SEQ ID NO:12431, SEQ ID NO:12432, SEQ ID NO:12433, SEQ ID NO:12434, SEQ ID NO:12435, SEQ ID NO:12436, SEQ ID NO:12437, SEQ ID NO:12438, SEQ ID NO:12439, SEQ ID NO:12440, SEQ ID NO:12441, SEQ ID NO:12442, SEQ ID NO:12443, SEQ ID NO:12444, SEQ ID NO:12445, SEQ ID NO:12446, SEQ ID NO:12447, SEQ ID NO:12448, SEQ ID NO:12449, SEQ ID NO:12450, SEQ ID NO:12451, SEQ ID NO:12452, SEQ ID NO:12453, SEQ ID NO:12454, SEQ ID NO:12455, SEQ ID NO:12456, SEQ ID NO:12457, SEQ ID NO:12458, SEQ ID NO:12459, SEQ ID NO:12460, SEQ ID NO:12461, SEQ ID NO:12462, SEQ ID NO:12463, SEQ ID NO:12464, SEQ ID NO:12465, SEQ ID NO:12466, SEQ ID NO:12467, SEQ ID NO:12468, SEQ ID NO:12469, SEQ ID NO:12470, SEQ ID NO:12471, SEQ ID NO:12472, SEQ ID NO:12473, SEQ ID NO:12474, SEQ ID NO:12475, SEQ ID NO:12476, SEQ ID NO:12477, SEQ ID NO:12478, SEQ ID NO:12479, SEQ ID NO:12480, SEQ ID NO:12481, SEQ ID NO:12482, SEQ ID NO:12483, SEQ ID NO:12484, SEQ ID NO:12485, SEQ ID NO:12486, SEQ ID NO:12487, SEQ ID NO:12488, SEQ ID NO:12489, SEQ ID NO:12490, SEQ ID NO:12491, SEQ ID NO:12492, SEQ ID NO:12493, SEQ ID NO:12494, SEQ ID NO:12495, SEQ ID NO:12496, SEQ ID NO:12497, SEQ ID NO:12498, SEQ ID NO:12499, SEQ ID NO:12500, SEQ ID NO:12501, SEQ ID NO:12502, SEQ ID NO:12503, SEQ ID NO:12504, SEQ ID NO:12505, SEQ ID NO:12506, SEQ ID NO:12507, SEQ ID NO:12508, SEQ ID NO:12509, SEQ ID NO:12510, SEQ ID NO:12511, SEQ ID NO:12512, SEQ ID NO:12513, SEQ ID NO:12514, SEQ ID NO:12515, SEQ ID NO:12516, SEQ ID NO:12517, SEQ ID NO:12518, SEQ ID NO:12519, SEQ ID NO:12520, SEQ ID NO:12521, SEQ ID NO:12522, SEQ ID NO:12523, SEQ ID NO:12524, SEQ ID NO:12525, SEQ ID NO:12526, SEQ ID NO:12527, SEQ ID NO:12528, SEQ ID NO:12529, SEQ ID NO:12530, SEQ ID NO:12531, SEQ ID NO:12532, SEQ ID NO:12533, SEQ ID NO:12534, SEQ ID NO:12535, SEQ ID NO:12536, SEQ ID NO:12537, SEQ ID NO:12538, SEQ ID NO:12539, SEQ ID NO:12540, SEQ ID NO:12541, SEQ ID NO:12542, SEQ ID NO:12543, SEQ ID NO:12544, SEQ ID NO:12545, SEQ ID NO:12546, SEQ ID NO:12547, SEQ ID NO:12548, SEQ ID NO:12549, SEQ ID NO:12550, SEQ ID NO:12551, SEQ ID NO:12552, SEQ ID NO:12553, SEQ ID NO:12554, SEQ ID NO:12555, SEQ ID NO:12556, SEQ ID NO:12557, SEQ ID NO:12558, SEQ ID NO:12559, SEQ ID NO:12560, SEQ ID NO:12561, SEQ ID NO:12562, SEQ ID NO:12563, SEQ ID NO:12564, SEQ ID NO:12565, SEQ ID NO:12566, SEQ ID NO:12567, SEQ ID NO:12568, SEQ ID NO:12569, SEQ ID NO:12570, SEQ ID NO:12571, SEQ ID NO:12572, SEQ ID NO:12573, SEQ ID NO:12574, SEQ ID NO:12575, SEQ ID NO:12576, SEQ ID NO:12577, SEQ ID NO:12578, SEQ ID NO:12579, SEQ ID NO:12580, SEQ ID NO:12581, SEQ ID NO:12582, SEQ ID NO:12583, SEQ ID NO:12584, SEQ ID NO:12585, SEQ ID NO:12586, SEQ ID NO:12587, SEQ ID NO:12588, SEQ ID NO:12589, SEQ ID NO:12590, SEQ ID NO:12591, SEQ ID NO:12592, SEQ ID NO:12593, SEQ ID NO:12594, SEQ ID NO:12595, SEQ ID NO:12596, SEQ ID NO:12597, SEQ ID NO:12598, SEQ ID NO:12599, SEQ ID NO:12600, SEQ ID NO:12601, SEQ ID NO:12602, SEQ ID NO:12603, SEQ ID NO:12604, SEQ ID NO:12605, SEQ ID NO:12606, SEQ ID NO:12607, SEQ ID NO:12608, SEQ ID NO:12609, SEQ ID NO:12610, SEQ ID NO:12611, SEQ ID NO:12612, SEQ ID NO:12613, SEQ ID NO:12614, SEQ ID NO:12615, SEQ ID NO:12616, SEQ ID NO:12617, SEQ ID NO:12618, SEQ ID NO:12619, SEQ ID NO:12620, SEQ ID NO:12621, SEQ ID NO:12622, SEQ ID NO:12623, SEQ ID NO:12624, SEQ ID NO:12625, SEQ ID NO:12626, SEQ ID NO:12627, SEQ ID NO:12628, SEQ ID NO:12629, SEQ ID NO:12630, SEQ ID NO:12631, SEQ ID NO:12632, SEQ ID NO:12633, SEQ ID NO:12634, SEQ ID NO:12635, SEQ ID NO:12636, SEQ ID NO:12637, SEQ ID NO:12638, SEQ ID NO:12639, SEQ ID NO:12640, SEQ ID NO:12641, SEQ ID NO:12642, SEQ ID NO:12643, SEQ ID NO:12644, SEQ ID NO:12645, SEQ ID NO:12646, SEQ ID NO:12647, SEQ ID NO:12648, SEQ ID NO:12649, SEQ ID NO:12650, SEQ ID NO:12651, SEQ ID NO:12652, SEQ ID NO:12653, SEQ ID NO:12654, SEQ ID NO:12655, SEQ ID NO:12656, SEQ ID NO:12657, SEQ ID NO:12658, SEQ ID NO:12659, SEQ ID NO:12660, SEQ ID NO:12661, SEQ ID NO:12662, SEQ ID NO:12663, SEQ ID NO:12664, SEQ ID NO:12665, SEQ ID NO:12666, SEQ ID NO:12667, SEQ ID NO:12668, SEQ ID NO:12669, SEQ ID NO:12670, SEQ ID NO:12671, SEQ ID NO:12672, SEQ ID NO:12673, SEQ ID NO:12674, SEQ ID NO:12675, SEQ ID NO:12676, SEQ ID NO:12677, SEQ ID NO:12678, SEQ ID NO:12679, SEQ ID NO:12680, SEQ ID NO:12681, SEQ ID NO:12682, SEQ ID NO:12683, SEQ ID NO:12684, SEQ ID NO:12685, SEQ ID NO:12686, SEQ ID NO:12687, SEQ ID NO:12688, SEQ ID NO:12689, SEQ ID NO:12690, SEQ ID NO:12691, SEQ ID NO:12692, SEQ ID NO:12693, SEQ ID NO:12694, SEQ ID NO:12695, SEQ ID NO:12696, SEQ ID NO:12697, SEQ ID NO:12698, SEQ ID NO:12699, SEQ ID NO:12700, SEQ ID NO:12701, SEQ ID NO:12702, SEQ ID NO:12703, SEQ ID NO:12704, SEQ ID NO:12705, SEQ ID NO:12706, SEQ ID NO:12707, SEQ ID NO:12708, SEQ ID NO:12709, SEQ ID NO:12710, SEQ ID NO:12711, SEQ ID NO:12712, SEQ ID NO:12713, SEQ ID NO:12714, SEQ ID NO:12715, SEQ ID NO:12716, SEQ ID NO:12717, SEQ ID NO:12718, SEQ ID NO:12719, SEQ ID NO:12720, SEQ ID NO:12721, SEQ ID NO:12722, SEQ ID NO:12723, SEQ ID NO:12724, SEQ ID NO:12725, SEQ ID NO:12726, SEQ ID NO:12727, SEQ ID NO:12728, SEQ ID NO:12729, SEQ ID NO:12730, SEQ ID NO:12731, SEQ ID NO:12732, SEQ ID NO:12733, SEQ ID NO:12734, SEQ ID NO:12735, SEQ ID NO:12736, SEQ ID NO:12737, SEQ ID NO:12738, SEQ ID NO:12739, SEQ ID NO:12740, SEQ ID NO:12741, SEQ ID NO:12742, SEQ ID NO:12743, SEQ ID NO:12744, SEQ ID NO:12745, SEQ ID NO:12746, SEQ ID NO:12747, SEQ ID NO:12748, SEQ ID NO:12749, SEQ ID NO:12750, SEQ ID NO:12751, SEQ ID NO:12752, SEQ ID NO:12753, SEQ ID NO:12754, SEQ ID NO:12755, SEQ ID NO:12756, SEQ ID NO:12757, SEQ ID NO:12758, SEQ ID NO:12759, SEQ ID NO:12760, SEQ ID NO:12761, SEQ ID NO:12762, SEQ ID NO:12763, SEQ ID NO:12764, SEQ ID NO:12765, SEQ ID NO:12766, SEQ ID NO:12767, SEQ ID NO:12768, SEQ ID NO:12769, SEQ ID NO:12770, SEQ ID NO:12771, SEQ ID NO:12772, SEQ ID NO:12773, SEQ ID NO:12774, SEQ ID NO:12775, SEQ ID NO:12776, SEQ ID NO:12777, SEQ ID NO:12778, SEQ ID NO:12779, SEQ ID NO:12780, SEQ ID NO:12781, SEQ ID NO:12782, SEQ ID NO:12783, SEQ ID NO:12784, SEQ ID NO:12785, SEQ ID NO:12786, SEQ ID NO:12787, SEQ ID NO:12788, SEQ ID NO:12789, SEQ ID NO:12790, SEQ ID NO:12791, SEQ ID NO:12792, SEQ ID NO:12793, SEQ ID NO:12794, SEQ ID NO:12795, SEQ ID NO:12796, SEQ ID NO:12797, SEQ ID NO:12798, SEQ ID NO:12799, SEQ ID NO:12800, SEQ ID NO:12801, SEQ ID NO:12802, SEQ ID NO:12803, SEQ ID NO:12804, SEQ ID NO:12805, SEQ ID NO:12806, SEQ ID NO:12807, SEQ ID NO:12808, SEQ ID NO:12809, SEQ ID NO:12810, SEQ ID NO:12811, SEQ ID NO:12812, SEQ ID NO:12813, SEQ ID NO:12814, SEQ ID NO:12815, SEQ ID NO:12816, SEQ ID NO:12817, SEQ ID NO:12818, SEQ ID NO:12819, SEQ ID NO:12820, SEQ ID NO:12821, SEQ ID NO:12822, SEQ ID NO:12823, SEQ ID NO:12824, SEQ ID NO:12825, SEQ ID NO:12826, SEQ ID NO:12827, SEQ ID NO:12828, SEQ ID NO:12829, SEQ ID NO:12830, SEQ ID NO:12831, SEQ ID NO:12832, SEQ ID NO:12833, SEQ ID NO:12834, SEQ ID NO:12835, SEQ ID NO:12836, SEQ ID NO:12837, SEQ ID NO:12838, SEQ ID NO:12839, SEQ ID NO:12840, SEQ ID NO:12841, SEQ ID NO:12842, SEQ ID NO:12843, SEQ ID NO:12844, SEQ ID NO:12845, SEQ ID NO:12846, SEQ ID NO:12847, SEQ ID NO:12848, SEQ ID NO:12849, SEQ ID NO:12850, SEQ ID NO:12851, SEQ ID NO:12852, SEQ ID NO:12853, SEQ ID NO:12854, SEQ ID NO:12855, SEQ ID NO:12856, SEQ ID NO:12857, SEQ ID NO:12858, SEQ ID NO:12859, SEQ ID NO:12860, SEQ ID NO:12861, SEQ ID NO:12862, SEQ ID NO:12863, SEQ ID NO:12864, SEQ ID NO:12865, SEQ ID NO:12866, SEQ ID NO:12867, SEQ ID NO:12868, SEQ ID NO:12869, SEQ ID NO:12870, SEQ ID NO:12871, SEQ ID NO:12872, SEQ ID NO:12873, SEQ ID NO:12874, SEQ ID NO:12875, SEQ ID NO:12876, SEQ ID NO:12877, SEQ ID NO:12878, SEQ ID NO:12879, SEQ ID NO:12880, SEQ ID NO:12881, SEQ ID NO:12882, SEQ ID NO:12883, SEQ ID NO:12884, SEQ ID NO:12885, SEQ ID NO:12886, SEQ ID NO:12887, SEQ ID NO:12888, SEQ ID NO:12889, SEQ ID NO:12890, SEQ ID NO:12891, SEQ ID NO:12892, SEQ ID NO:12893, SEQ ID NO:12894, SEQ ID NO:12895, SEQ ID NO:12896, SEQ ID NO:12897, SEQ ID NO:12898, SEQ ID NO:12899, SEQ ID NO:12900, SEQ ID NO:12901, SEQ ID NO:12902, SEQ ID NO:12903, SEQ ID NO:12904, SEQ ID NO:12905, SEQ ID NO:12906, SEQ ID NO:12907, SEQ ID NO:12908, SEQ ID NO:12909, SEQ ID NO:12910, SEQ ID NO:12911, SEQ ID NO:12912, SEQ ID NO:12913, SEQ ID NO:12914, SEQ ID NO:12915, SEQ ID NO:12916, SEQ ID NO:12917, SEQ ID NO:12918, SEQ ID NO:12919, SEQ ID NO:12920, SEQ ID NO:12921, SEQ ID NO:12922, SEQ ID NO:12923, SEQ ID NO:12924, SEQ ID NO:12925, SEQ ID NO:12926, SEQ ID NO:12927, SEQ ID NO:12928, SEQ ID NO:12929, SEQ ID NO:12930, SEQ ID NO:12931, SEQ ID NO:12932, SEQ ID NO:12933, SEQ ID NO:12934, SEQ ID NO:12935, SEQ ID NO:12936, SEQ ID NO:12937, SEQ ID NO:12938, SEQ ID NO:12939, SEQ ID NO:12940, SEQ ID NO:12941, SEQ ID NO:12942, SEQ ID NO:12943, SEQ ID NO:12944, SEQ ID NO:12945, SEQ ID NO:12946, SEQ ID NO:12947, SEQ ID NO:12948, SEQ ID NO:12949, SEQ ID NO:12950, SEQ ID NO:12951, SEQ ID NO:12952, SEQ ID NO:12953, SEQ ID NO:12954, SEQ ID NO:12955, SEQ ID NO:12956, SEQ ID NO:12957, SEQ ID NO:12958, SEQ ID NO:12959, SEQ ID NO:12960, SEQ ID NO:12961, SEQ ID NO:12962, SEQ ID NO:12963, SEQ ID NO:12964, SEQ ID NO:12965, SEQ ID NO:12966, SEQ ID NO:12967, SEQ ID NO:12968, SEQ ID NO:12969, SEQ ID NO:12970, SEQ ID NO:12971, SEQ ID NO:12972, SEQ ID NO:12973, SEQ ID NO:12974, SEQ ID NO:12975, SEQ ID NO:12976, SEQ ID NO:12977, SEQ ID NO:12978, SEQ ID NO:12979, SEQ ID NO:12980, SEQ ID NO:12981, SEQ ID NO:12982, SEQ ID NO:12983, SEQ ID NO:12984, SEQ ID NO:12985, SEQ ID NO:12986, SEQ ID NO:12987, SEQ ID NO:12988, SEQ ID NO:12989, SEQ ID NO:12990, SEQ ID NO:12991, SEQ ID NO:12992, SEQ ID NO:12993, SEQ ID NO:12994, SEQ ID NO:12995, SEQ ID NO:12996, SEQ ID NO:12997, SEQ ID NO:12998, SEQ ID NO:12999, SEQ ID NO:13000, SEQ ID NO:13001, SEQ ID NO:13002, SEQ ID NO:13003, SEQ ID NO:13004, SEQ ID NO:13005, SEQ ID NO:13006, SEQ ID NO:13007, SEQ ID NO:13008, SEQ ID NO:13009, SEQ ID NO:13010, SEQ ID NO:13011, SEQ ID NO:13012, SEQ ID NO:13013, SEQ ID NO:13014, SEQ ID NO:13015, SEQ ID NO:13016, SEQ ID NO:13017, SEQ ID NO:13018, SEQ ID NO:13019, SEQ ID NO:13020, SEQ ID NO:13021, SEQ ID NO:13022, SEQ ID NO:13023, SEQ ID NO:13024, SEQ ID NO:13025, SEQ ID NO:13026, SEQ ID NO:13027, SEQ ID NO:13028, SEQ ID NO:13029, SEQ ID NO:13030, SEQ ID NO:13031, SEQ ID NO:13032, SEQ ID NO:13033, SEQ ID NO:13034, SEQ ID NO:13035, SEQ ID NO:13036, SEQ ID NO:13037, SEQ ID NO:13038, SEQ ID NO:13039, SEQ ID NO:13040, SEQ ID NO:13041, SEQ ID NO:13042, SEQ ID NO:13043, SEQ ID NO:13044, SEQ ID NO:13045, SEQ ID NO:13046, SEQ ID NO:13047, SEQ ID NO:13048, SEQ ID NO:13049, SEQ ID NO:13050, SEQ ID NO:13051, SEQ ID NO:13052, SEQ ID NO:13053, SEQ ID NO:13054, SEQ ID NO:13055, SEQ ID NO:13056, SEQ ID NO:13057, SEQ ID NO:13058, SEQ ID NO:13059, SEQ ID NO:13060, SEQ ID NO:13061, SEQ ID NO:13062, SEQ ID NO:13063, SEQ ID NO:13064, SEQ ID NO:13065, SEQ ID NO:13066, SEQ ID NO:13067, SEQ ID NO:13068, SEQ ID NO:13069, SEQ ID NO:13070, SEQ ID NO:13071, SEQ ID NO:13072, SEQ ID NO:13073, SEQ ID NO:13074, SEQ ID NO:13075, SEQ ID NO:13076, SEQ ID NO:13077, SEQ ID NO:13078, SEQ ID NO:13079, SEQ ID NO:13080, SEQ ID NO:13081, SEQ ID NO:13082, SEQ ID NO:13083, SEQ ID NO:13084, SEQ ID NO:13085, SEQ ID NO:13086, SEQ ID NO:13087, SEQ ID NO:13088, SEQ ID NO:13089, SEQ ID NO:13090, SEQ ID NO:13091, SEQ ID NO:13092, SEQ ID NO:13093, SEQ ID NO:13094, SEQ ID NO:13095, SEQ ID NO:13096, SEQ ID NO:13097, SEQ ID NO:13098, SEQ ID NO:13099, SEQ ID NO:13100, SEQ ID NO:13101, SEQ ID NO:13102, SEQ ID NO:13103, SEQ ID NO:13104, SEQ ID NO:13105, SEQ ID NO:13106, SEQ ID NO:13107, SEQ ID NO:13108, SEQ ID NO:13109, SEQ ID NO:13110, SEQ ID NO:13111, SEQ ID NO:13112, SEQ ID NO:13113, SEQ ID NO:13114, SEQ ID NO:13115, SEQ ID NO:13116, SEQ ID NO:13117, SEQ ID NO:13118, SEQ ID NO:13119, SEQ ID NO:13120, SEQ ID NO:13121, SEQ ID NO:13122, SEQ ID NO:13123, SEQ ID NO:13124, SEQ ID NO:13125, SEQ ID NO:13126, SEQ ID NO:13127, SEQ ID NO:13128, SEQ ID NO:13129, SEQ ID NO:13130, SEQ ID NO:13131, SEQ ID NO:13132, SEQ ID NO:13133, SEQ ID NO:13134, SEQ ID NO:13135, SEQ ID NO:13136, SEQ ID NO:13137, SEQ ID NO:13138, SEQ ID NO:13139, SEQ ID NO:13140, SEQ ID NO:13141, SEQ ID NO:13142, SEQ ID NO:13143, SEQ ID NO:13144, SEQ ID NO:13145, SEQ ID NO:13146, SEQ ID NO:13147, SEQ ID NO:13148, SEQ ID NO:13149, SEQ ID NO:13150, SEQ ID NO:13151, SEQ ID NO:13152, SEQ ID NO:13153, SEQ ID NO:13154, SEQ ID NO:13155, SEQ ID NO:13156, SEQ ID NO:13157, SEQ ID NO:13158, SEQ ID NO:13159, SEQ ID NO:13160, SEQ ID NO:13161, SEQ ID NO:13162, SEQ ID NO:13163, SEQ ID NO:13164, SEQ ID NO:13165, SEQ ID NO:13166, SEQ ID NO:13167, SEQ ID NO:13168, SEQ ID NO:13169, SEQ ID NO:13170, SEQ ID NO:13171, SEQ ID NO:13172, SEQ ID NO:13173, SEQ ID NO:13174, SEQ ID NO:13175, SEQ ID NO:13176, SEQ ID NO:13177, SEQ ID NO:13178, SEQ ID NO:13179, SEQ ID NO:13180, SEQ ID NO:13181, SEQ ID NO:13182, SEQ ID NO:13183, SEQ ID NO:13184, SEQ ID NO:13185, SEQ ID NO:13186, SEQ ID NO:13187, SEQ ID NO:13188, SEQ ID NO:13189, SEQ ID NO:13190, SEQ ID NO:13191, SEQ ID NO:13192, SEQ ID NO:13193, SEQ ID NO:13194, SEQ ID NO:13195, SEQ ID NO:13196, SEQ ID NO:13197, SEQ ID NO:13198, SEQ ID NO:13199, SEQ ID NO:13200, SEQ ID NO:13201, SEQ ID NO:13202, SEQ ID NO:13203, SEQ ID NO:13204, SEQ ID NO:13205, SEQ ID NO:13206, SEQ ID NO:13207, SEQ ID NO:13208, SEQ ID NO:13209, SEQ ID NO:13210, SEQ ID NO:13211, SEQ ID NO:13212, SEQ ID NO:13213, SEQ ID NO:13214, SEQ ID NO:13215, SEQ ID NO:13216, SEQ ID NO:13217, SEQ ID NO:13218, SEQ ID NO:13219, SEQ ID NO:13220, SEQ ID NO:13221, SEQ ID NO:13222, SEQ ID NO:13223, SEQ ID NO:13224, SEQ ID NO:13225, SEQ ID NO:13226, SEQ ID NO:13227, SEQ ID NO:13228, SEQ ID NO:13229, SEQ ID NO:13230, SEQ ID NO:13231, SEQ ID NO:13232, SEQ ID NO:13233, SEQ ID NO:13234, SEQ ID NO:13235, SEQ ID NO:13236, SEQ ID NO:13237, SEQ ID NO:13238, SEQ ID NO:13239, SEQ ID NO:13240, SEQ ID NO:13241, SEQ ID NO:13242, SEQ ID NO:13243, SEQ ID NO:13244, SEQ ID NO:13245, SEQ ID NO:13246, SEQ ID NO:13247, SEQ ID NO:13248, SEQ ID NO:13249, SEQ ID NO:13250, SEQ ID NO:13251, SEQ ID NO:13252, SEQ ID NO:13253, SEQ ID NO:13254, SEQ ID NO:13255, SEQ ID NO:13256, SEQ ID NO:13257, SEQ ID NO:13258, SEQ ID NO:13259, SEQ ID NO:13260, SEQ ID NO:13261, SEQ ID NO:13262, SEQ ID NO:13263, SEQ ID NO:13264, SEQ ID NO:13265, SEQ ID NO:13266, SEQ ID NO:13267, SEQ ID NO:13268, SEQ ID NO:13269, SEQ ID NO:13270, SEQ ID NO:13271, SEQ ID NO:13272, SEQ ID NO:13273, SEQ ID NO:13274, SEQ ID NO:13275, SEQ ID NO:13276, SEQ ID NO:13277, SEQ ID NO:13278, SEQ ID NO:13279, SEQ ID NO:13280, SEQ ID NO:13281, SEQ ID NO:13282, SEQ ID NO:13283, SEQ ID NO:13284, SEQ ID NO:13285, SEQ ID NO:13286, SEQ ID NO:13287, SEQ ID NO:13288, SEQ ID NO:13289, SEQ ID NO:13290, SEQ ID NO:13291, SEQ ID NO:13292, SEQ ID NO:13293, SEQ ID NO:13294, SEQ ID NO:13295, SEQ ID NO:13296, SEQ ID NO:13297, SEQ ID NO:13298, SEQ ID NO:13299, SEQ ID NO:13300, SEQ ID NO:13301, SEQ ID NO:13302, SEQ ID NO:13303, SEQ ID NO:13304, SEQ ID NO:13305, SEQ ID NO:13306, SEQ ID NO:13307, SEQ ID NO:13308, SEQ ID NO:13309, SEQ ID NO:13310, SEQ ID NO:13311, SEQ ID NO:13312, SEQ ID NO:13313, SEQ ID NO:13314, SEQ ID NO:13315, SEQ ID NO:13316, SEQ ID NO:13317, SEQ ID NO:13318, SEQ ID NO:13319, SEQ ID NO:13320, SEQ ID NO:13321, SEQ ID NO:13322, SEQ ID NO:13323, SEQ ID NO:13324, SEQ ID NO:13325, SEQ ID NO:13326, SEQ ID NO:13327, SEQ ID NO:13328, SEQ ID NO:13329, SEQ ID NO:13330, SEQ ID NO:13331, SEQ ID NO:13332, SEQ ID NO:13333, SEQ ID NO:13334, SEQ ID NO:13335, SEQ ID NO:13336, SEQ ID NO:13337, SEQ ID NO:13338, SEQ ID NO:13339, SEQ ID NO:13340, SEQ ID NO:13341, SEQ ID NO:13342, SEQ ID NO:13343, SEQ ID NO:13344, SEQ ID NO:13345, SEQ ID NO:13346, SEQ ID NO:13347, SEQ ID NO:13348, SEQ ID NO:13349, SEQ ID NO:13350, SEQ ID NO:13351, SEQ ID NO:13352, SEQ ID NO:13353, SEQ ID NO:13354, SEQ ID NO:13355, SEQ ID NO:13356, SEQ ID NO:13357, SEQ ID NO:13358, SEQ ID NO:13359, SEQ ID NO:13360, SEQ ID NO:13361, SEQ ID NO:13362, SEQ ID NO:13363, SEQ ID NO:13364, SEQ ID NO:13365, SEQ ID NO:13366, SEQ ID NO:13367, SEQ ID NO:13368, SEQ ID NO:13369, SEQ ID NO:13370, SEQ ID NO:13371, SEQ ID NO:13372, SEQ ID NO:13373, SEQ ID NO:13374, SEQ ID NO:13375, SEQ ID NO:13376, SEQ ID NO:13377, SEQ ID NO:13378, SEQ ID NO:13379, SEQ ID NO:13380, SEQ ID NO:13381, SEQ ID NO:13382, SEQ ID NO:13383, SEQ ID NO:13384, SEQ ID NO:13385, SEQ ID NO:13386, SEQ ID NO:13387, SEQ ID NO:13388, SEQ ID NO:13389, SEQ ID NO:13390, SEQ ID NO:13391, SEQ ID NO:13392, SEQ ID NO:13393, SEQ ID NO:13394, SEQ ID NO:13395, SEQ ID NO:13396, SEQ ID NO:13397, SEQ ID NO:13398, SEQ ID NO:13399, SEQ ID NO:13400, SEQ ID NO:13401, SEQ ID NO:13402, SEQ ID NO:13403, SEQ ID NO:13404, SEQ ID NO:13405, SEQ ID NO:13406, SEQ ID NO:13407, SEQ ID NO:13408, SEQ ID NO:13409, SEQ ID NO:13410, SEQ ID NO:13411, SEQ ID NO:13412, SEQ ID NO:13413, SEQ ID NO:13414, SEQ ID NO:13415, SEQ ID NO:13416, SEQ ID NO:13417, SEQ ID NO:13418, SEQ ID NO:13419, SEQ ID NO:13420, SEQ ID NO:13421, SEQ ID NO:13422, SEQ ID NO:13423, SEQ ID NO:13424, SEQ ID NO:13425, SEQ ID NO:13426, SEQ ID NO:13427, SEQ ID NO:13428, SEQ ID NO:13429, SEQ ID NO:13430, SEQ ID NO:13431, SEQ ID NO:13432, SEQ ID NO:13433, SEQ ID NO:13434, SEQ ID NO:13435, SEQ ID NO:13436, SEQ ID NO:13437, SEQ ID NO:13438, SEQ ID NO:13439, SEQ ID NO:13440, SEQ ID NO:13441, SEQ ID NO:13442, SEQ ID NO:13443, SEQ ID NO:13444, SEQ ID NO:13445, SEQ ID NO:13446, SEQ ID NO:13447, SEQ ID NO:13448, SEQ ID NO:13449, SEQ ID NO:13450, SEQ ID NO:13451, SEQ ID NO:13452, SEQ ID NO:13453, SEQ ID NO:13454, SEQ ID NO:13455, SEQ ID NO:13456, SEQ ID NO:13457, SEQ ID NO:13458, SEQ ID NO:13459, SEQ ID NO:13460, SEQ ID NO:13461, SEQ ID NO:13462, SEQ ID NO:13463, SEQ ID NO:13464, SEQ ID NO:13465, SEQ ID NO:13466, SEQ ID NO:13467, SEQ ID NO:13468, SEQ ID NO:13469, SEQ ID NO:13470, SEQ ID NO:13471, SEQ ID NO:13472, SEQ ID NO:13473, SEQ ID NO:13474, SEQ ID NO:13475, SEQ ID NO:13476, SEQ ID NO:13477, SEQ ID NO:13478, SEQ ID NO:13479, SEQ ID NO:13480, SEQ ID NO:13481, SEQ ID NO:13482, or SEQ ID NO:13483.

[0085] In embodiments, the probe includes SEQ ID NO:13484 and SEQ ID NO:11428. In embodiments, the probe includes SEQ ID NO:13485 and SEQ ID NO:11429. In embodiments, the probe includes SEQ ID NO:13486 and SEQ ID NO:11430. In embodiments, the probe includes SEQ ID NO:13487 and SEQ ID NO:11431. In embodiments, the probe includes SEQ ID NO:13488 and SEQ ID NO:11432. In embodiments, the probe includes SEQ ID NO:13489 and SEQ ID NO:11433. In embodiments, the probe includes SEQ ID NO:13490 and SEQ ID NO:11434. In embodiments, the probe includes SEQ ID NO:13491 and SEQ ID NO:11435. In embodiments, the probe includes SEQ ID NO:13492 and SEQ ID NO:11436. In embodiments, the probe includes SEQ ID NO:13493 and SEQ ID NO:11437. In embodiments, the probe includes SEQ ID NO:13494 and SEQ ID NO:11438. In embodiments, the probe includes SEQ ID NO:13495 and SEQ ID NO:11439. In embodiments, the probe includes SEQ ID NO:13496 and SEQ ID NO:11440. In embodiments, the probe includes SEQ ID NO:13497 and SEQ ID NO:11441. In embodiments, the probe includes SEQ ID NO:13498 and SEQ ID NO:11442. In embodiments, the probe includes SEQ ID NO:13499 and SEQ ID NO:11443. In embodiments, the probe includes SEQ ID NO:13500 and SEQ ID NO:11444. In embodiments, the probe includes SEQ ID NO:13501 and SEQ ID NO:11445. In embodiments, the probe includes SEQ ID NO:13502 and SEQ ID NO:11446. In embodiments, the probe includes SEQ ID NO:13503 and SEQ ID NO:11447. In embodiments, the probe includes SEQ ID NO:13504 and SEQ ID NO:11448. In embodiments, the probe includes SEQ ID NO:13505 and SEQ ID NO:11449. In embodiments, the probe includes SEQ ID NO:13506 and SEQ ID NO:11450. In embodiments, the probe includes SEQ ID NO:13507 and SEQ ID NO:11451. In embodiments, the probe includes SEQ ID NO:13508 and SEQ ID NO:11452. In embodiments, the probe includes SEQ ID NO:13509 and SEQ ID NO:11453. In embodiments, the probe includes SEQ ID NO:13510 and SEQ ID NO:11454. In embodiments, the probe includes SEQ ID NO:13511 and SEQ ID NO:11455. In embodiments, the probe includes SEQ ID NO:13512 and SEQ ID NO:11456. In embodiments, the probe includes SEQ ID NO:13513 and SEQ ID NO:11457. In embodiments, the probe includes SEQ ID NO:13514 and SEQ ID NO:11458. In embodiments, the probe includes SEQ ID NO:13515 and SEQ ID NO:11459. In embodiments, the probe includes SEQ ID NO:13516 and SEQ ID NO:11460. In embodiments, the probe includes SEQ ID NO:13517 and SEQ ID NO:11461. In embodiments, the probe includes SEQ ID NO:13518 and SEQ ID NO:11462. In embodiments, the probe includes SEQ ID NO:13519 and SEQ ID NO:11463. In embodiments, the probe includes SEQ ID NO:13520 and SEQ ID NO:11464. In embodiments, the probe includes SEQ ID NO:13521 and SEQ ID NO:11465. In embodiments, the probe includes SEQ ID NO:13522 and SEQ ID NO:11466. In embodiments, the probe includes SEQ ID NO:13523 and SEQ ID NO:11467. In embodiments, the probe includes SEQ ID NO:13524 and SEQ ID NO:11468. In embodiments, the probe includes SEQ ID NO:13525 and SEQ ID NO:11469. In embodiments, the probe includes SEQ ID NO:13526 and SEQ ID NO:11470. In embodiments, the probe includes SEQ ID NO:13527 and SEQ ID NO:11471. In embodiments, the probe includes SEQ ID NO:13528 and SEQ ID NO:11472. In embodiments, the probe includes SEQ ID NO:13529 and SEQ ID NO:11473. In embodiments, the probe includes SEQ ID NO:13530 and SEQ ID NO:11474. In embodiments, the probe includes SEQ ID NO:13531 and SEQ ID NO:11475. In embodiments, the probe includes SEQ ID NO:13532 and SEQ ID NO:11476. In embodiments, the probe includes SEQ ID NO:13533 and SEQ ID NO:11477. In embodiments, the probe includes SEQ ID NO:13534 and SEQ ID NO:11478. In embodiments, the probe includes SEQ ID NO:13535 and SEQ ID NO:11479. In embodiments, the probe includes SEQ ID NO:13536 and SEQ ID NO:11480. In embodiments, the probe includes SEQ ID NO:13537 and SEQ ID NO:11481. In embodiments, the probe includes SEQ ID NO:13538 and SEQ ID NO:11482. In embodiments, the probe includes SEQ ID NO:13539 and SEQ ID NO:11483. In embodiments, the probe includes SEQ ID NO:13540 and SEQ ID NO:11484. In embodiments, the probe includes SEQ ID NO:13541 and SEQ ID NO:11485. In embodiments, the probe includes SEQ ID NO:13542 and SEQ ID NO:11486. In embodiments, the probe includes SEQ ID NO:13543 and SEQ ID NO:11487. In embodiments, the probe includes SEQ ID NO:13544 and SEQ ID NO:11488. In embodiments, the probe includes SEQ ID NO:13545 and SEQ ID NO:11489. In embodiments, the probe includes SEQ ID NO:13546 and SEQ ID NO:11490. In embodiments, the probe includes SEQ ID NO:13547 and SEQ ID NO:11491. In embodiments, the probe includes SEQ ID NO:13548 and SEQ ID NO:11492. In embodiments, the probe includes SEQ ID NO:13549 and SEQ ID NO:11493. In embodiments, the probe includes SEQ ID NO:13550 and SEQ ID NO:11494. In embodiments, the probe includes SEQ ID NO:13551 and SEQ ID NO:11495. In embodiments, the probe includes SEQ ID NO:13552 and SEQ ID NO:11496. In embodiments, the probe includes SEQ ID NO:13553 and SEQ ID NO:11497. In embodiments, the probe includes SEQ ID NO:13554 and SEQ ID NO:11498. In embodiments, the probe includes SEQ ID NO:13555 and SEQ ID NO:11499. In embodiments, the probe includes SEQ ID NO:13556 and SEQ ID NO:11500. In embodiments, the probe includes SEQ ID NO:13557 and SEQ ID NO:11501. In embodiments, the probe includes SEQ ID NO:13558 and SEQ ID NO:11502. In embodiments, the probe includes SEQ ID NO:13559 and SEQ ID NO:11503. In embodiments, the probe includes SEQ ID NO:13560 and SEQ ID NO:11504. In embodiments, the probe includes SEQ ID NO:13561 and SEQ ID NO:11505. In embodiments, the probe includes SEQ ID NO:13562 and SEQ ID NO:11506. In embodiments, the probe includes SEQ ID NO:13563 and SEQ ID NO:11507. In embodiments, the probe includes SEQ ID NO:13564 and SEQ ID NO:11508. In embodiments, the probe includes SEQ ID NO:13565 and SEQ ID NO:11509. In embodiments, the probe includes SEQ ID NO:13566 and SEQ ID NO:11510. In embodiments, the probe includes SEQ ID NO:13567 and SEQ ID NO:11511. In embodiments, the probe includes SEQ ID NO:13568 and SEQ ID NO:11512. In embodiments, the probe includes SEQ ID NO:13569 and SEQ ID NO:11513. In embodiments, the probe includes SEQ ID NO:13570 and SEQ ID NO:11514. In embodiments, the probe includes SEQ ID NO:13571 and SEQ ID NO:11515. In embodiments, the probe includes SEQ ID NO:13572 and SEQ ID NO:11516. In embodiments, the probe includes SEQ ID NO:13573 and SEQ ID NO:11517. In embodiments, the probe includes SEQ ID NO:13574 and SEQ ID NO:11518. In embodiments, the probe includes SEQ ID NO:13575 and SEQ ID NO:11519. In embodiments, the probe includes SEQ ID NO:13576 and SEQ ID NO:11520. In embodiments, the probe includes SEQ ID NO:13577 and SEQ ID NO:11521. In embodiments, the probe includes SEQ ID NO:13578 and SEQ ID NO:11522. In embodiments, the probe includes SEQ ID NO:13579 and SEQ ID NO:11523. In embodiments, the probe includes SEQ ID NO:13580 and SEQ ID NO:11524. In embodiments, the probe includes SEQ ID NO:13581 and SEQ ID NO:11525. In embodiments, the probe includes SEQ ID NO:13582 and SEQ ID NO:11526. In embodiments, the probe includes SEQ ID NO:13583 and SEQ ID NO:11527. In embodiments, the probe includes SEQ ID NO:13584 and SEQ ID NO:11528. In embodiments, the probe includes SEQ ID NO:13585 and SEQ ID NO:11529. In embodiments, the probe includes SEQ ID NO:13586 and SEQ ID NO:11530. In embodiments, the probe includes SEQ ID NO:13587 and SEQ ID NO:11531. In embodiments, the probe includes SEQ ID NO:13588 and SEQ ID NO:11532. In embodiments, the probe includes SEQ ID NO:13589 and SEQ ID NO:11533. In embodiments, the probe includes SEQ ID NO:13590 and SEQ ID NO:11534. In embodiments, the probe includes SEQ ID NO:13591 and SEQ ID NO:11535. In embodiments, the probe includes SEQ ID NO:13592 and SEQ ID NO:11536. In embodiments, the probe includes SEQ ID NO:13593 and SEQ ID NO:11537. In embodiments, the probe includes SEQ ID NO:13594 and SEQ ID NO:11538. In embodiments, the probe includes SEQ ID NO:13595 and SEQ ID NO:11539. In embodiments, the probe includes SEQ ID NO:13596 and SEQ ID NO:11540. In embodiments, the probe includes SEQ ID NO:13597 and SEQ ID NO:11541. In embodiments, the probe includes SEQ ID NO:13598 and SEQ ID NO:11542. In embodiments, the probe includes SEQ ID NO:13599 and SEQ ID NO:11543. In embodiments, the probe includes SEQ ID NO:13600 and SEQ ID NO:11544. In embodiments, the probe includes SEQ ID NO:13601 and SEQ ID NO:11545. In embodiments, the probe includes SEQ ID NO:13602 and SEQ ID NO:11546. In embodiments, the probe includes SEQ ID NO:13603 and SEQ ID NO:11547. In embodiments, the probe includes SEQ ID NO:13604 and SEQ ID NO:11548. In embodiments, the probe includes SEQ ID NO:13605 and SEQ ID NO:11549. In embodiments, the probe includes SEQ ID NO:13606 and SEQ ID NO:11550. In embodiments, the probe includes SEQ ID NO:13607 and SEQ ID NO:11551. In embodiments, the probe includes SEQ ID NO:13608 and SEQ ID NO:11552. In embodiments, the probe includes SEQ ID NO:13609 and SEQ ID NO:11553. In embodiments, the probe includes SEQ ID NO:13610 and SEQ ID NO:11554. In embodiments, the probe includes SEQ ID NO:13611 and SEQ ID NO:11555. In embodiments, the probe includes SEQ ID NO:13612 and SEQ ID NO:11556. In embodiments, the probe includes SEQ ID NO:13613 and SEQ ID NO:11557. In embodiments, the probe includes SEQ ID NO:13614 and SEQ ID NO:11558. In embodiments, the probe includes SEQ ID NO:13615 and SEQ ID NO:11559. In embodiments, the probe includes SEQ ID NO:13616 and SEQ ID NO:11560. In embodiments, the probe includes SEQ ID NO:13617 and SEQ ID NO:11561. In embodiments, the probe includes SEQ ID NO:13618 and SEQ ID NO:11562. In embodiments, the probe includes SEQ ID NO:13619 and SEQ ID NO:11563. In embodiments, the probe includes SEQ ID NO:13620 and SEQ ID NO:11564. In embodiments, the probe includes SEQ ID NO:13621 and SEQ ID NO:11565. In embodiments, the probe includes SEQ ID NO:13622 and SEQ ID NO:11566. In embodiments, the probe includes SEQ ID NO:13623 and SEQ ID NO:11567. In embodiments, the probe includes SEQ ID NO:13624 and SEQ ID NO:11568. In embodiments, the probe includes SEQ ID NO:13625 and SEQ ID NO:11569. In embodiments, the probe includes SEQ ID NO:13626 and SEQ ID NO:11570. In embodiments, the probe includes SEQ ID NO:13627 and SEQ ID NO:11571. In embodiments, the probe includes SEQ ID NO:13628 and SEQ ID NO:11572. In embodiments, the probe includes SEQ ID NO:13629 and SEQ ID NO:11573. In embodiments, the probe includes SEQ ID NO:13630 and SEQ ID NO:11574. In embodiments, the probe includes SEQ ID NO:13631 and SEQ ID NO:11575. In embodiments, the probe includes SEQ ID NO:13632 and SEQ ID NO:11576. In embodiments, the probe includes SEQ ID NO:13633 and SEQ ID NO:11577. In embodiments, the probe includes SEQ ID NO:13634 and SEQ ID NO:11578. In embodiments, the probe includes SEQ ID NO:13635 and SEQ ID NO:11579. In embodiments, the probe includes SEQ ID NO:13636 and SEQ ID NO:11580. In embodiments, the probe includes SEQ ID NO:13637 and SEQ ID NO:11581. In embodiments, the probe includes SEQ ID NO:13638 and SEQ ID NO:11582. In embodiments, the probe includes SEQ ID NO:13639 and SEQ ID NO:11583. In embodiments, the probe includes SEQ ID NO:13640 and SEQ ID NO:11584. In embodiments, the probe includes SEQ ID NO:13641 and SEQ ID NO:11585. In embodiments, the probe includes SEQ ID NO:13642 and SEQ ID NO:11586. In embodiments, the probe includes SEQ ID NO:13643 and SEQ ID NO:11587. In embodiments, the probe includes SEQ ID NO:13644 and SEQ ID NO:11588. In embodiments, the probe includes SEQ ID NO:13645 and SEQ ID NO:11589. In embodiments, the probe includes SEQ ID NO:13646 and SEQ ID NO:11590. In embodiments, the probe includes SEQ ID NO:13647 and SEQ ID NO:11591. In embodiments, the probe includes SEQ ID NO:13648 and SEQ ID NO:11592. In embodiments, the probe includes SEQ ID NO:13649 and SEQ ID NO:11593. In embodiments, the probe includes SEQ ID NO:13650 and SEQ ID NO:11594. In embodiments, the probe includes SEQ ID NO:13651 and SEQ ID NO:11595. In embodiments, the probe includes SEQ ID NO:13652 and SEQ ID NO:11596. In embodiments, the probe includes SEQ ID NO:13653 and SEQ ID NO:11597. In embodiments, the probe includes SEQ ID NO:13654 and SEQ ID NO:11598. In embodiments, the probe includes SEQ ID NO:13655 and SEQ ID NO:11599. In embodiments, the probe includes SEQ ID NO:13656 and SEQ ID NO:11600. In embodiments, the probe includes SEQ ID NO:13657 and SEQ ID NO:11601. In embodiments, the probe includes SEQ ID NO:13658 and SEQ ID NO:11602. In embodiments, the probe includes SEQ ID NO:13659 and SEQ ID NO:11603. In embodiments, the probe includes SEQ ID NO:13660 and SEQ ID NO:11604. In embodiments, the probe includes SEQ ID NO:13661 and SEQ ID NO:11605. In embodiments, the probe includes SEQ ID NO:13662 and SEQ ID NO:11606. In embodiments, the probe includes SEQ ID NO:13663 and SEQ ID NO:11607. In embodiments, the probe includes SEQ ID NO:13664 and SEQ ID NO:11608. In embodiments, the probe includes SEQ ID NO:13665 and SEQ ID NO:11609. In embodiments, the probe includes SEQ ID NO:13666 and SEQ ID NO:11610. In embodiments, the probe includes SEQ ID NO:13667 and SEQ ID NO:11611. In embodiments, the probe includes SEQ ID NO:13668 and SEQ ID NO:11612. In embodiments, the probe includes SEQ ID NO:13669 and SEQ ID NO:11613. In embodiments, the probe includes SEQ ID NO:13670 and SEQ ID NO:11614. In embodiments, the probe includes SEQ ID NO:13671 and SEQ ID NO:11615. In embodiments, the probe includes SEQ ID NO:13672 and SEQ ID NO:11616. In embodiments, the probe includes SEQ ID NO:13673 and SEQ ID NO:11617. In embodiments, the probe includes SEQ ID NO:13674 and SEQ ID NO:11618. In embodiments, the probe includes SEQ ID NO:13675 and SEQ ID NO:11619. In embodiments, the probe includes SEQ ID NO:13676 and SEQ ID NO:11620. In embodiments, the probe includes SEQ ID NO:13677 and SEQ ID NO:11621. In embodiments, the probe includes SEQ ID NO:13678 and SEQ ID NO:11622. In embodiments, the probe includes SEQ ID NO:13679 and SEQ ID NO:11623. In embodiments, the probe includes SEQ ID NO:13680 and SEQ ID NO:11624. In embodiments, the probe includes SEQ ID NO:13681 and SEQ ID NO:11625. In embodiments, the probe includes SEQ ID NO:13682 and SEQ ID NO:11626. In embodiments, the probe includes SEQ ID NO:13683 and SEQ ID NO:11627. In embodiments, the probe includes SEQ ID NO:13684 and SEQ ID NO:11628. In embodiments, the probe includes SEQ ID NO:13685 and SEQ ID NO:11629. In embodiments, the probe includes SEQ ID NO:13686 and SEQ ID NO:11630. In embodiments, the probe includes SEQ ID NO:13687 and SEQ ID NO:11631. In embodiments, the probe includes SEQ ID NO:13688 and SEQ ID NO:11632. In embodiments, the probe includes SEQ ID NO:13689 and SEQ ID NO:11633. In embodiments, the probe includes SEQ ID NO:13690 and SEQ ID NO:11634. In embodiments, the probe includes SEQ ID NO:13691 and SEQ ID NO:11635. In embodiments, the probe includes SEQ ID NO:13692 and SEQ ID NO:11636. In embodiments, the probe includes SEQ ID NO:13693 and SEQ ID NO:11637. In embodiments, the probe includes SEQ ID NO:13694 and SEQ ID NO:11638. In embodiments, the probe includes SEQ ID NO:13695 and SEQ ID NO:11639. In embodiments, the probe includes SEQ ID NO:13696 and SEQ ID NO:11640. In embodiments, the probe includes SEQ ID NO:13697 and SEQ ID NO:11641. In embodiments, the probe includes SEQ ID NO:13698 and SEQ ID NO:11642. In embodiments, the probe includes SEQ ID NO:13699 and SEQ ID NO:11643. In embodiments, the probe includes SEQ ID NO:13700 and SEQ ID NO:11644. In embodiments, the probe includes SEQ ID NO:13701 and SEQ ID NO:11645. In embodiments, the probe includes SEQ ID NO:13702 and SEQ ID NO:11646. In embodiments, the probe includes SEQ ID NO:13703 and SEQ ID NO:11647. In embodiments, the probe includes SEQ ID NO:13704 and SEQ ID NO:11648. In embodiments, the probe includes SEQ ID NO:13705 and SEQ ID NO:11649. In embodiments, the probe includes SEQ ID NO:13706 and SEQ ID NO:11650. In embodiments, the probe includes SEQ ID NO:13707 and SEQ ID NO:11651. In embodiments, the probe includes SEQ ID NO:13708 and SEQ ID NO:11652. In embodiments, the probe includes SEQ ID NO:13709 and SEQ ID NO:11653. In embodiments, the probe includes SEQ ID NO:13710 and SEQ ID NO:11654. In embodiments, the probe includes SEQ ID NO:13711 and SEQ ID NO:11655. In embodiments, the probe includes SEQ ID NO:13712 and SEQ ID NO:11656. In embodiments, the probe includes SEQ ID NO:13713 and SEQ ID NO:11657. In embodiments, the probe includes SEQ ID NO:13714 and SEQ ID NO:11658. In embodiments, the probe includes SEQ ID NO:13715 and SEQ ID NO:11659. In embodiments, the probe includes SEQ ID NO:13716 and SEQ ID NO:11660. In embodiments, the probe includes SEQ ID NO:13717 and SEQ ID NO:11661. In embodiments, the probe includes SEQ ID NO:13718 and SEQ ID NO:11662. In embodiments, the probe includes SEQ ID NO:13719 and SEQ ID NO:11663. In embodiments, the probe includes SEQ ID NO:13720 and SEQ ID NO:11664. In embodiments, the probe includes SEQ ID NO:13721 and SEQ ID NO:11665. In embodiments, the probe includes SEQ ID NO:13722 and SEQ ID NO:11666. In embodiments, the probe includes SEQ ID NO:13723 and SEQ ID NO:11667. In embodiments, the probe includes SEQ ID NO:13724 and SEQ ID NO:11668. In embodiments, the probe includes SEQ ID NO:13725 and SEQ ID NO:11669. In embodiments, the probe includes SEQ ID NO:13726 and SEQ ID NO:11670. In embodiments, the probe includes SEQ ID NO:13727 and SEQ ID NO:11671. In embodiments, the probe includes SEQ ID NO:13728 and SEQ ID NO:11672. In embodiments, the probe includes SEQ ID NO:13729 and SEQ ID NO:11673. In embodiments, the probe includes SEQ ID NO:13730 and SEQ ID NO:11674. In embodiments, the probe includes SEQ ID NO:13731 and SEQ ID NO:11675. In embodiments, the probe includes SEQ ID NO:13732 and SEQ ID NO:11676. In embodiments, the probe includes SEQ ID NO:13733 and SEQ ID NO:11677. In embodiments, the probe includes SEQ ID NO:13734 and SEQ ID NO:11678. In embodiments, the probe includes SEQ ID NO:13735 and SEQ ID NO:11679. In embodiments, the probe includes SEQ ID NO:13736 and SEQ ID NO:11680. In embodiments, the probe includes SEQ ID NO:13737 and SEQ ID NO:11681. In embodiments, the probe includes SEQ ID NO:13738 and SEQ ID NO:11682. In embodiments, the probe includes SEQ ID NO:13739 and SEQ ID NO:11683. In embodiments, the probe includes SEQ ID NO:13740 and SEQ ID NO:11684. In embodiments, the probe includes SEQ ID NO:13741 and SEQ ID NO:11685. In embodiments, the probe includes SEQ ID NO:13742 and SEQ ID NO:11686. In embodiments, the probe includes SEQ ID NO:13743 and SEQ ID NO:11687. In embodiments, the probe includes SEQ ID NO:13744 and SEQ ID NO:11688. In embodiments, the probe includes SEQ ID NO:13745 and SEQ ID NO:11689. In embodiments, the probe includes SEQ ID NO:13746 and SEQ ID NO:11690. In embodiments, the probe includes SEQ ID NO:13747 and SEQ ID NO:11691. In embodiments, the probe includes SEQ ID NO:13748 and SEQ ID NO:11692. In embodiments, the probe includes SEQ ID NO:13749 and SEQ ID NO:11693. In embodiments, the probe includes SEQ ID NO:13750 and SEQ ID NO:11694. In embodiments, the probe includes SEQ ID NO:13751 and SEQ ID NO:11695. In embodiments, the probe includes SEQ ID NO:13752 and SEQ ID NO:11696. In embodiments, the probe includes SEQ ID NO:13753 and SEQ ID NO:11697. In embodiments, the probe includes SEQ ID NO:13754 and SEQ ID NO:11698. In embodiments, the probe includes SEQ ID NO:13755 and SEQ ID NO:11699. In embodiments, the probe includes SEQ ID NO:13756 and SEQ ID NO:11700. In embodiments, the probe includes SEQ ID NO:13757 and SEQ ID NO:11701. In embodiments, the probe includes SEQ ID NO:13758 and SEQ ID NO:11702. In embodiments, the probe includes SEQ ID NO:13759 and SEQ ID NO:11703. In embodiments, the probe includes SEQ ID NO:13760 and SEQ ID NO:11704. In embodiments, the probe includes SEQ ID NO:13761 and SEQ ID NO:11705. In embodiments, the probe includes SEQ ID NO:13762 and SEQ ID NO:11706. In embodiments, the probe includes SEQ ID NO:13763 and SEQ ID NO:11707. In embodiments, the probe includes SEQ ID NO:13764 and SEQ ID NO:11708. In embodiments, the probe includes SEQ ID NO:13765 and SEQ ID NO:11709. In embodiments, the probe includes SEQ ID NO:13766 and SEQ ID NO:11710. In embodiments, the probe includes SEQ ID NO:13767 and SEQ ID NO:11711. In embodiments, the probe includes SEQ ID NO:13768 and SEQ ID NO:11712. In embodiments, the probe includes SEQ ID NO:13769 and SEQ ID NO:11713. In embodiments, the probe includes SEQ ID NO:13770 and SEQ ID NO:11714. In embodiments, the probe includes SEQ ID NO:13771 and SEQ ID NO:11715. In embodiments, the probe includes SEQ ID NO:13772 and SEQ ID NO:11716. In embodiments, the probe includes SEQ ID NO:13773 and SEQ ID NO:11717. In embodiments, the probe includes SEQ ID NO:13774 and SEQ ID NO:11718. In embodiments, the probe includes SEQ ID NO:13775 and SEQ ID NO:11719. In embodiments, the probe includes SEQ ID NO:13776 and SEQ ID NO:11720. In embodiments, the probe includes SEQ ID NO:13777 and SEQ ID NO:11721. In embodiments, the probe includes SEQ ID NO:13778 and SEQ ID NO:11722. In embodiments, the probe includes SEQ ID NO:13779 and SEQ ID NO:11723. In embodiments, the probe includes SEQ ID NO:13780 and SEQ ID NO:11724. In embodiments, the probe includes SEQ ID NO:13781 and SEQ ID NO:11725. In embodiments, the probe includes SEQ ID NO:13782 and SEQ ID NO:11726. In embodiments, the probe includes SEQ ID NO:13783 and SEQ ID NO:11727. In embodiments, the probe includes SEQ ID NO:13784 and SEQ ID NO:11728. In embodiments, the probe includes SEQ ID NO:13785 and SEQ ID NO:11729. In embodiments, the probe includes SEQ ID NO:13786 and SEQ ID NO:11730. In embodiments, the probe includes SEQ ID NO:13787 and SEQ ID NO:11731. In embodiments, the probe includes SEQ ID NO:13788 and SEQ ID NO:11732. In embodiments, the probe includes SEQ ID NO:13789 and SEQ ID NO:11733. In embodiments, the probe includes SEQ ID NO:13790 and SEQ ID NO:11734. In embodiments, the probe includes SEQ ID NO:13791 and SEQ ID NO:11735. In embodiments, the probe includes SEQ ID NO:13792 and SEQ ID NO:11736. In embodiments, the probe includes SEQ ID NO:13793 and SEQ ID NO:11737. In embodiments, the probe includes SEQ ID NO:13794 and SEQ ID NO:11738. In embodiments, the probe includes SEQ ID NO:13795 and SEQ ID NO:11739. In embodiments, the probe includes SEQ ID NO:13796 and SEQ ID NO:11740. In embodiments, the probe includes SEQ ID NO:13797 and SEQ ID NO:11741. In embodiments, the probe includes SEQ ID NO:13798 and SEQ ID NO:11742. In embodiments, the probe includes SEQ ID NO:13799 and SEQ ID NO:11743. In embodiments, the probe includes SEQ ID NO:13800 and SEQ ID NO:11744. In embodiments, the probe includes SEQ ID NO:13801 and SEQ ID NO:11745. In embodiments, the probe includes SEQ ID NO:13802 and SEQ ID NO:11746. In embodiments, the probe includes SEQ ID NO:13803 and SEQ ID NO:11747. In embodiments, the probe includes SEQ ID NO:13804 and SEQ ID NO:11748. In embodiments, the probe includes SEQ ID NO:13805 and SEQ ID NO:11749. In embodiments, the probe includes SEQ ID NO:13806 and SEQ ID NO:11750. In embodiments, the probe includes SEQ ID NO:13807 and SEQ ID NO:11751. In embodiments, the probe includes SEQ ID NO:13808 and SEQ ID NO:11752. In embodiments, the probe includes SEQ ID NO:13809 and SEQ ID NO:11753. In embodiments, the probe includes SEQ ID NO:13810 and SEQ ID NO:11754. In embodiments, the probe includes SEQ ID NO:13811 and SEQ ID NO:11755. In embodiments, the probe includes SEQ ID NO:13812 and SEQ ID NO:11756. In embodiments, the probe includes SEQ ID NO:13813 and SEQ ID NO:11757. In embodiments, the probe includes SEQ ID NO:13814 and SEQ ID NO:11758. In embodiments, the probe includes SEQ ID NO:13815 and SEQ ID NO:11759. In embodiments, the probe includes SEQ ID NO:13816 and SEQ ID NO:11760. In embodiments, the probe includes SEQ ID NO:13817 and SEQ ID NO:11761. In embodiments, the probe includes SEQ ID NO:13818 and SEQ ID NO:11762. In embodiments, the probe includes SEQ ID NO:13819 and SEQ ID NO:11763. In embodiments, the probe includes SEQ ID NO:13820 and SEQ ID NO:11764. In embodiments, the probe includes SEQ ID NO:13821 and SEQ ID NO:11765. In embodiments, the probe includes SEQ ID NO:13822 and SEQ ID NO:11766. In embodiments, the probe includes SEQ ID NO:13823 and SEQ ID NO:11767. In embodiments, the probe includes SEQ ID NO:13824 and SEQ ID NO:11768. In embodiments, the probe includes SEQ ID NO:13825 and SEQ ID NO:11769. In embodiments, the probe includes SEQ ID NO:13826 and SEQ ID NO:11770. In embodiments, the probe includes SEQ ID NO:13827 and SEQ ID NO:11771. In embodiments, the probe includes SEQ ID NO:13828 and SEQ ID NO:11772. In embodiments, the probe includes SEQ ID NO:13829 and SEQ ID NO:11773. In embodiments, the probe includes SEQ ID NO:13830 and SEQ ID NO:11774. In embodiments, the probe includes SEQ ID NO:13831 and SEQ ID NO:11775. In embodiments, the probe includes SEQ ID NO:13832 and SEQ ID NO:11776. In embodiments, the probe includes SEQ ID NO:13833 and SEQ ID NO:11777. In embodiments, the probe includes SEQ ID NO:13834 and SEQ ID NO:11778. In embodiments, the probe includes SEQ ID NO:13835 and SEQ ID NO:11779. In embodiments, the probe includes SEQ ID NO:13836 and SEQ ID NO:11780. In embodiments, the probe includes SEQ ID NO:13837 and SEQ ID NO:11781. In embodiments, the probe includes SEQ ID NO:13838 and SEQ ID NO:11782. In embodiments, the probe includes SEQ ID NO:13839 and SEQ ID NO:11783. In embodiments, the probe includes SEQ ID NO:13840 and SEQ ID NO:11784. In embodiments, the probe includes SEQ ID NO:13841 and SEQ ID NO:11785. In embodiments, the probe includes SEQ ID NO:13842 and SEQ ID NO:11786. In embodiments, the probe includes SEQ ID NO:13843 and SEQ ID NO:11787. In embodiments, the probe includes SEQ ID NO:13844 and SEQ ID NO:11788. In embodiments, the probe includes SEQ ID NO:13845 and SEQ ID NO:11789. In embodiments, the probe includes SEQ ID NO:13846 and SEQ ID NO:11790. In embodiments, the probe includes SEQ ID NO:13847 and SEQ ID NO:11791. In embodiments, the probe includes SEQ ID NO:13848 and SEQ ID NO:11792. In embodiments, the probe includes SEQ ID NO:13849 and SEQ ID NO:11793. In embodiments, the probe includes SEQ ID NO:13850 and SEQ ID NO:11794. In embodiments, the probe includes SEQ ID NO:13851 and SEQ ID NO:11795. In embodiments, the probe includes SEQ ID NO:13852 and SEQ ID NO:11796. In embodiments, the probe includes SEQ ID NO:13853 and SEQ ID NO:11797. In embodiments, the probe includes SEQ ID NO:13854 and SEQ ID NO:11798. In embodiments, the probe includes SEQ ID NO:13855 and SEQ ID NO:11799. In embodiments, the probe includes SEQ ID NO:13856 and SEQ ID NO:11800. In embodiments, the probe includes SEQ ID NO:13857 and SEQ ID NO:11801. In embodiments, the probe includes SEQ ID NO:13858 and SEQ ID NO:11802. In embodiments, the probe includes SEQ ID NO:13859 and SEQ ID NO:11803. In embodiments, the probe includes SEQ ID NO:13860 and SEQ ID NO:11804. In embodiments, the probe includes SEQ ID NO:13861 and SEQ ID NO:11805. In embodiments, the probe includes SEQ ID NO:13862 and SEQ ID NO:11806. In embodiments, the probe includes SEQ ID NO:13863 and SEQ ID NO:11807. In embodiments, the probe includes SEQ ID NO:13864 and SEQ ID NO:11808. In embodiments, the probe includes SEQ ID NO:13865 and SEQ ID NO:11809. In embodiments, the probe includes SEQ ID NO:13866 and SEQ ID NO:11810. In embodiments, the probe includes SEQ ID NO:13867 and SEQ ID NO:11811. In embodiments, the probe includes SEQ ID NO:13868 and SEQ ID NO:11812. In embodiments, the probe includes SEQ ID NO:13869 and SEQ ID NO:11813. In embodiments, the probe includes SEQ ID NO:13870 and SEQ ID NO:11814. In embodiments, the probe includes SEQ ID NO:13871 and SEQ ID NO:11815. In embodiments, the probe includes SEQ ID NO:13872 and SEQ ID NO:11816. In embodiments, the probe includes SEQ ID NO:13873 and SEQ ID NO:11817. In embodiments, the probe includes SEQ ID NO:13874 and SEQ ID NO:11818. In embodiments, the probe includes SEQ ID NO:13875 and SEQ ID NO:11819. In embodiments, the probe includes SEQ ID NO:13876 and SEQ ID NO:11820. In embodiments, the probe includes SEQ ID NO:13877 and SEQ ID NO:11821. In embodiments, the probe includes SEQ ID NO:13878 and SEQ ID NO:11822. In embodiments, the probe includes SEQ ID NO:13879 and SEQ ID NO:11823. In embodiments, the probe includes SEQ ID NO:13880 and SEQ ID NO:11824. In embodiments, the probe includes SEQ ID NO:13881 and SEQ ID NO:11825. In embodiments, the probe includes SEQ ID NO:13882 and SEQ ID NO:11826. In embodiments, the probe includes SEQ ID NO:13883 and SEQ ID NO:11827. In embodiments, the probe includes SEQ ID NO:13884 and SEQ ID NO:11828. In embodiments, the probe includes SEQ ID NO:13885 and SEQ ID NO:11829. In embodiments, the probe includes SEQ ID NO:13886 and SEQ ID NO:11830. In embodiments, the probe includes SEQ ID NO:13887 and SEQ ID NO:11831. In embodiments, the probe includes SEQ ID NO:13888 and SEQ ID NO:11832. In embodiments, the probe includes SEQ ID NO:13889 and SEQ ID NO:11833. In embodiments, the probe includes SEQ ID NO:13890 and SEQ ID NO:11834. In embodiments, the probe includes SEQ ID NO:13891 and SEQ ID NO:11835. In embodiments, the probe includes SEQ ID NO:13892 and SEQ ID NO:11836. In embodiments, the probe includes SEQ ID NO:13893 and SEQ ID NO:11837. In embodiments, the probe includes SEQ ID NO:13894 and SEQ ID NO:11838. In embodiments, the probe includes SEQ ID NO:13895 and SEQ ID NO:11839. In embodiments, the probe includes SEQ ID NO:13896 and SEQ ID NO:11840. In embodiments, the probe includes SEQ ID NO:13897 and SEQ ID NO:11841. In embodiments, the probe includes SEQ ID NO:13898 and SEQ ID NO:11842. In embodiments, the probe includes SEQ ID NO:13899 and SEQ ID NO:11843. In embodiments, the probe includes SEQ ID NO:13900 and SEQ ID NO:11844. In embodiments, the probe includes SEQ ID NO:13901 and SEQ ID NO:11845. In embodiments, the probe includes SEQ ID NO:13902 and SEQ ID NO:11846. In embodiments, the probe includes SEQ ID NO:13903 and SEQ ID NO:11847. In embodiments, the probe includes SEQ ID NO:13904 and SEQ ID NO:11848. In embodiments, the probe includes SEQ ID NO:13905 and SEQ ID NO:11849. In embodiments, the probe includes SEQ ID NO:13906 and SEQ ID NO:11850. In embodiments, the probe includes SEQ ID NO:13907 and SEQ ID NO:11851. In embodiments, the probe includes SEQ ID NO:13908 and SEQ ID NO:11852. In embodiments, the probe includes SEQ ID NO:13909 and SEQ ID NO:11853. In embodiments, the probe includes SEQ ID NO:13910 and SEQ ID NO:11854. In embodiments, the probe includes SEQ ID NO:13911 and SEQ ID NO:11855. In embodiments, the probe includes SEQ ID NO:13912 and SEQ ID NO:11856. In embodiments, the probe includes SEQ ID NO:13913 and SEQ ID NO:11857. In embodiments, the probe includes SEQ ID NO:13914 and SEQ ID NO:11858. In embodiments, the probe includes SEQ ID NO:13915 and SEQ ID NO:11859. In embodiments, the probe includes SEQ ID NO:13916 and SEQ ID NO:11860. In embodiments, the probe includes SEQ ID NO:13917 and SEQ ID NO:11861. In embodiments, the probe includes SEQ ID NO:13918 and SEQ ID NO:11862. In embodiments, the probe includes SEQ ID NO:13919 and SEQ ID NO:11863. In embodiments, the probe includes SEQ ID NO:13920 and SEQ ID NO:11864. In embodiments, the probe includes SEQ ID NO:13921 and SEQ ID NO:11865. In embodiments, the probe includes SEQ ID NO:13922 and SEQ ID NO:11866. In embodiments, the probe includes SEQ ID NO:13923 and SEQ ID NO:11867. In embodiments, the probe includes SEQ ID NO:13924 and SEQ ID NO:11868. In embodiments, the probe includes SEQ ID NO:13925 and SEQ ID NO:11869. In embodiments, the probe includes SEQ ID NO:13926 and SEQ ID NO:11870. In embodiments, the probe includes SEQ ID NO:13927 and SEQ ID NO:11871. In embodiments, the probe includes SEQ ID NO:13928 and SEQ ID NO:11872. In embodiments, the probe includes SEQ ID NO:13929 and SEQ ID NO:11873. In embodiments, the probe includes SEQ ID NO:13930 and SEQ ID NO:11874. In embodiments, the probe includes SEQ ID NO:13931 and SEQ ID NO:11875. In embodiments, the probe includes SEQ ID NO:13932 and SEQ ID NO:11876. In embodiments, the probe includes SEQ ID NO:13933 and SEQ ID NO:11877. In embodiments, the probe includes SEQ ID NO:13934 and SEQ ID NO:11878. In embodiments, the probe includes SEQ ID NO:13935 and SEQ ID NO:11879. In embodiments, the probe includes SEQ ID NO:13936 and SEQ ID NO:11880. In embodiments, the probe includes SEQ ID NO:13937 and SEQ ID NO:11881. In embodiments, the probe includes SEQ ID NO:13938 and SEQ ID NO:11882. In embodiments, the probe includes SEQ ID NO:13939 and SEQ ID NO:11883. In embodiments, the probe includes SEQ ID NO:13940 and SEQ ID NO:11884. In embodiments, the probe includes SEQ ID NO:13941 and SEQ ID NO:11885. In embodiments, the probe includes SEQ ID NO:13942 and SEQ ID NO:11886. In embodiments, the probe includes SEQ ID NO:13943 and SEQ ID NO:11887. In embodiments, the probe includes SEQ ID NO:13944 and SEQ ID NO:11888. In embodiments, the probe includes SEQ ID NO:13945 and SEQ ID NO:11889. In embodiments, the probe includes SEQ ID NO:13946 and SEQ ID NO:11890. In embodiments, the probe includes SEQ ID NO:13947 and SEQ ID NO:11891. In embodiments, the probe includes SEQ ID NO:13948 and SEQ ID NO:11892. In embodiments, the probe includes SEQ ID NO:13949 and SEQ ID NO:11893. In embodiments, the probe includes SEQ ID NO:13950 and SEQ ID NO:11894. In embodiments, the probe includes SEQ ID NO:13951 and SEQ ID NO:11895. In embodiments, the probe includes SEQ ID NO:13952 and SEQ ID NO:11896. In embodiments, the probe includes SEQ ID NO:13953 and SEQ ID NO:11897. In embodiments, the probe includes SEQ ID NO:13954 and SEQ ID NO:11898. In embodiments, the probe includes SEQ ID NO:13955 and SEQ ID NO:11899. In embodiments, the probe includes SEQ ID NO:13956 and SEQ ID NO:11900. In embodiments, the probe includes SEQ ID NO:13957 and SEQ ID NO:11901. In embodiments, the probe includes SEQ ID NO:13958 and SEQ ID NO:11902. In embodiments, the probe includes SEQ ID NO:13959 and SEQ ID NO:11903. In embodiments, the probe includes SEQ ID NO:13960 and SEQ ID NO:11904. In embodiments, the probe includes SEQ ID NO:13961 and SEQ ID NO:11905. In embodiments, the probe includes SEQ ID NO:13962 and SEQ ID NO:11906. In embodiments, the probe includes SEQ ID NO:13963 and SEQ ID NO:11907. In embodiments, the probe includes SEQ ID NO:13964 and SEQ ID NO:11908. In embodiments, the probe includes SEQ ID NO:13965 and SEQ ID NO:11909. In embodiments, the probe includes SEQ ID NO:13966 and SEQ ID NO:11910. In embodiments, the probe includes SEQ ID NO:13967 and SEQ ID NO:11911. In embodiments, the probe includes SEQ ID NO:13968 and SEQ ID NO:11912. In embodiments, the probe includes SEQ ID NO:13969 and SEQ ID NO:11913. In embodiments, the probe includes SEQ ID NO:13970 and SEQ ID NO:11914. In embodiments, the probe includes SEQ ID NO:13971 and SEQ ID NO:11915. In embodiments, the probe includes SEQ ID NO:13972 and SEQ ID NO:11916. In embodiments, the probe includes SEQ ID NO:13973 and SEQ ID NO:11917. In embodiments, the probe includes SEQ ID NO:13974 and SEQ ID NO:11918. In embodiments, the probe includes SEQ ID NO:13975 and SEQ ID NO:11919. In embodiments, the probe includes SEQ ID NO:13976 and SEQ ID NO:11920. In embodiments, the probe includes SEQ ID NO:13977 and SEQ ID NO:11921. In embodiments, the probe includes SEQ ID NO:13978 and SEQ ID NO:11922. In embodiments, the probe includes SEQ ID NO:13979 and SEQ ID NO:11923. In embodiments, the probe includes SEQ ID NO:13980 and SEQ ID NO:11924. In embodiments, the probe includes SEQ ID NO:13981 and SEQ ID NO:11925. In embodiments, the probe includes SEQ ID NO:13982 and SEQ ID NO:11926. In embodiments, the probe includes SEQ ID NO:13983 and SEQ ID NO:11927. In embodiments, the probe includes SEQ ID NO:13984 and SEQ ID NO:11928. In embodiments, the probe includes SEQ ID NO:13985 and SEQ ID NO:11929. In embodiments, the probe includes SEQ ID NO:13986 and SEQ ID NO:11930. In embodiments, the probe includes SEQ ID NO:13987 and SEQ ID NO:11931. In embodiments, the probe includes SEQ ID NO:13988 and SEQ ID NO:11932. In embodiments, the probe includes SEQ ID NO:13989 and SEQ ID NO:11933. In embodiments, the probe includes SEQ ID NO:13990 and SEQ ID NO:11934. In embodiments, the probe includes SEQ ID NO:13991 and SEQ ID NO:11935. In embodiments, the probe includes SEQ ID NO:13992 and SEQ ID NO:11936. In embodiments, the probe includes SEQ ID NO:13993 and SEQ ID NO:11937. In embodiments, the probe includes SEQ ID NO:13994 and SEQ ID NO:11938. In embodiments, the probe includes SEQ ID NO:13995 and SEQ ID NO:11939. In embodiments, the probe includes SEQ ID NO:13996 and SEQ ID NO:11940. In embodiments, the probe includes SEQ ID NO:13997 and SEQ ID NO:11941. In embodiments, the probe includes SEQ ID NO:13998 and SEQ ID NO:11942. In embodiments, the probe includes SEQ ID NO:13999 and SEQ ID NO:11943. In embodiments, the probe includes SEQ ID NO:14000 and SEQ ID NO:11944. In embodiments, the probe includes SEQ ID NO:14001 and SEQ ID NO:11945. In embodiments, the probe includes SEQ ID NO:14002 and SEQ ID NO:11946. In embodiments, the probe includes SEQ ID NO:14003 and SEQ ID NO:11947. In embodiments, the probe includes SEQ ID NO:14004 and SEQ ID NO:11948. In embodiments, the probe includes SEQ ID NO:14005 and SEQ ID NO:11949. In embodiments, the probe includes SEQ ID NO:14006 and SEQ ID NO:11950. In embodiments, the probe includes SEQ ID NO:14007 and SEQ ID NO:11951. In embodiments, the probe includes SEQ ID NO:14008 and SEQ ID NO:11952. In embodiments, the probe includes SEQ ID NO:14009 and SEQ ID NO:11953. In embodiments, the probe includes SEQ ID NO:14010 and SEQ ID NO:11954. In embodiments, the probe includes SEQ ID NO:14011 and SEQ ID NO:11955. In embodiments, the probe includes SEQ ID NO:14012 and SEQ ID NO:11956. In embodiments, the probe includes SEQ ID NO:14013 and SEQ ID NO:11957. In embodiments, the probe includes SEQ ID NO:14014 and SEQ ID NO:11958. In embodiments, the probe includes SEQ ID NO:14015 and SEQ ID NO:11959. In embodiments, the probe includes SEQ ID NO:14016 and SEQ ID NO:11960. In embodiments, the probe includes SEQ ID NO:14017 and SEQ ID NO:11961. In embodiments, the probe includes SEQ ID NO:14018 and SEQ ID NO:11962. In embodiments, the probe includes SEQ ID NO:14019 and SEQ ID NO:11963. In embodiments, the probe includes SEQ ID NO:14020 and SEQ ID NO:11964. In embodiments, the probe includes SEQ ID NO:14021 and SEQ ID NO:11965. In embodiments, the probe includes SEQ ID NO:14022 and SEQ ID NO:11966. In embodiments, the probe includes SEQ ID NO:14023 and SEQ ID NO:11967. In embodiments, the probe includes SEQ ID NO:14024 and SEQ ID NO:11968. In embodiments, the probe includes SEQ ID NO:14025 and SEQ ID NO:11969. In embodiments, the probe includes SEQ ID NO:14026 and SEQ ID NO:11970. In embodiments, the probe includes SEQ ID NO:14027 and SEQ ID NO:11971. In embodiments, the probe includes SEQ ID NO:14028 and SEQ ID NO:11972. In embodiments, the probe includes SEQ ID NO:14029 and SEQ ID NO:11973. In embodiments, the probe includes SEQ ID NO:14030 and SEQ ID NO:11974. In embodiments, the probe includes SEQ ID NO:14031 and SEQ ID NO:11975. In embodiments, the probe includes SEQ ID NO:14032 and SEQ ID NO:11976. In embodiments, the probe includes SEQ ID NO:14033 and SEQ ID NO:11977. In embodiments, the probe includes SEQ ID NO:14034 and SEQ ID NO:11978. In embodiments, the probe includes SEQ ID NO:14035 and SEQ ID NO:11979. In embodiments, the probe includes SEQ ID NO:14036 and SEQ ID NO:11980. In embodiments, the probe includes SEQ ID NO:14037 and SEQ ID NO:11981. In embodiments, the probe includes SEQ ID NO:14038 and SEQ ID NO:11982. In embodiments, the probe includes SEQ ID NO:14039 and SEQ ID NO:11983. In embodiments, the probe includes SEQ ID NO:14040 and SEQ ID NO:11984. In embodiments, the probe includes SEQ ID NO:14041 and SEQ ID NO:11985. In embodiments, the probe includes SEQ ID NO:14042 and SEQ ID NO:11986. In embodiments, the probe includes SEQ ID NO:14043 and SEQ ID NO:11987. In embodiments, the probe includes SEQ ID NO:14044 and SEQ ID NO:11988. In embodiments, the probe includes SEQ ID NO:14045 and SEQ ID NO:11989. In embodiments, the probe includes SEQ ID NO:14046 and SEQ ID NO:11990. In embodiments, the probe includes SEQ ID NO:14047 and SEQ ID NO:11991. In embodiments, the probe includes SEQ ID NO:14048 and SEQ ID NO:11992. In embodiments, the probe includes SEQ ID NO:14049 and SEQ ID NO:11993. In embodiments, the probe includes SEQ ID NO:14050 and SEQ ID NO:11994. In embodiments, the probe includes SEQ ID NO:14051 and SEQ ID NO:11995. In embodiments, the probe includes SEQ ID NO:14052 and SEQ ID NO:11996. In embodiments, the probe includes SEQ ID NO:14053 and SEQ ID NO:11997. In embodiments, the probe includes SEQ ID NO:14054 and SEQ ID NO:11998. In embodiments, the probe includes SEQ ID NO:14055 and SEQ ID NO:11999. In embodiments, the probe includes SEQ ID NO:14056 and SEQ ID NO:12000. In embodiments, the probe includes SEQ ID NO:14057 and SEQ ID NO:12001. In embodiments, the probe includes SEQ ID NO:14058 and SEQ ID NO:12002. In embodiments, the probe includes SEQ ID NO:14059 and SEQ ID NO:12003. In embodiments, the probe includes SEQ ID NO:14060 and SEQ ID NO:12004. In embodiments, the probe includes SEQ ID NO:14061 and SEQ ID NO:12005. In embodiments, the probe includes SEQ ID NO:14062 and SEQ ID NO:12006. In embodiments, the probe includes SEQ ID NO:14063 and SEQ ID NO:12007. In embodiments, the probe includes SEQ ID NO:14064 and SEQ ID NO:12008. In embodiments, the probe includes SEQ ID NO:14065 and SEQ ID NO:12009. In embodiments, the probe includes SEQ ID NO:14066 and SEQ ID NO:12010. In embodiments, the probe includes SEQ ID NO:14067 and SEQ ID NO:12011. In embodiments, the probe includes SEQ ID NO:14068 and SEQ ID NO:12012. In embodiments, the probe includes SEQ ID NO:14069 and SEQ ID NO:12013. In embodiments, the probe includes SEQ ID NO:14070 and SEQ ID NO:12014. In embodiments, the probe includes SEQ ID NO:14071 and SEQ ID NO:12015. In embodiments, the probe includes SEQ ID NO:14072 and SEQ ID NO:12016. In embodiments, the probe includes SEQ ID NO:14073 and SEQ ID NO:12017. In embodiments, the probe includes SEQ ID NO:14074 and SEQ ID NO:12018. In embodiments, the probe includes SEQ ID NO:14075 and SEQ ID NO:12019. In embodiments, the probe includes SEQ ID NO:14076 and SEQ ID NO:12020. In embodiments, the probe includes SEQ ID NO:14077 and SEQ ID NO:12021. In embodiments, the probe includes SEQ ID NO:14078 and SEQ ID NO:12022. In embodiments, the probe includes SEQ ID NO:14079 and SEQ ID NO:12023. In embodiments, the probe includes SEQ ID NO:14080 and SEQ ID NO:12024. In embodiments, the probe includes SEQ ID NO:14081 and SEQ ID NO:12025. In embodiments, the probe includes SEQ ID NO:14082 and SEQ ID NO:12026. In embodiments, the probe includes SEQ ID NO:14083 and SEQ ID NO:12027. In embodiments, the probe includes SEQ ID NO:14084 and SEQ ID NO:12028. In embodiments, the probe includes SEQ ID NO:14085 and SEQ ID NO:12029. In embodiments, the probe includes SEQ ID NO:14086 and SEQ ID NO:12030. In embodiments, the probe includes SEQ ID NO:14087 and SEQ ID NO:12031. In embodiments, the probe includes SEQ ID NO:14088 and SEQ ID NO:12032. In embodiments, the probe includes SEQ ID NO:14089 and SEQ ID NO:12033. In embodiments, the probe includes SEQ ID NO:14090 and SEQ ID NO:12034. In embodiments, the probe includes SEQ ID NO:14091 and SEQ ID NO:12035. In embodiments, the probe includes SEQ ID NO:14092 and SEQ ID NO:12036. In embodiments, the probe includes SEQ ID NO:14093 and SEQ ID NO:12037. In embodiments, the probe includes SEQ ID NO:14094 and SEQ ID NO:12038. In embodiments, the probe includes SEQ ID NO:14095 and SEQ ID NO:12039. In embodiments, the probe includes SEQ ID NO:14096 and SEQ ID NO:12040. In embodiments, the probe includes SEQ ID NO:14097 and SEQ ID NO:12041. In embodiments, the probe includes SEQ ID NO:14098 and SEQ ID NO:12042. In embodiments, the probe includes SEQ ID NO:14099 and SEQ ID NO:12043. In embodiments, the probe includes SEQ ID NO:14100 and SEQ ID NO:12044. In embodiments, the probe includes SEQ ID NO:14101 and SEQ ID NO:12045. In embodiments, the probe includes SEQ ID NO:14102 and SEQ ID NO:12046. In embodiments, the probe includes SEQ ID NO:14103 and SEQ ID NO:12047. In embodiments, the probe includes SEQ ID NO:14104 and SEQ ID NO:12048. In embodiments, the probe includes SEQ ID NO:14105 and SEQ ID NO:12049. In embodiments, the probe includes SEQ ID NO:14106 and SEQ ID NO:12050. In embodiments, the probe includes SEQ ID NO:14107 and SEQ ID NO:12051. In embodiments, the probe includes SEQ ID NO:14108 and SEQ ID NO:12052. In embodiments, the probe includes SEQ ID NO:14109 and SEQ ID NO:12053. In embodiments, the probe includes SEQ ID NO:14110 and SEQ ID NO:12054. In embodiments, the probe includes SEQ ID NO:14111 and SEQ ID NO:12055. In embodiments, the probe includes SEQ ID NO:14112 and SEQ ID NO:12056. In embodiments, the probe includes SEQ ID NO:14113 and SEQ ID NO:12057. In embodiments, the probe includes SEQ ID NO:14114 and SEQ ID NO:12058. In embodiments, the probe includes SEQ ID NO:14115 and SEQ ID NO:12059. In embodiments, the probe includes SEQ ID NO:14116 and SEQ ID NO:12060. In embodiments, the probe includes SEQ ID NO:14117 and SEQ ID NO:12061. In embodiments, the probe includes SEQ ID NO:14118 and SEQ ID NO:12062. In embodiments, the probe includes SEQ ID NO:14119 and SEQ ID NO:12063. In embodiments, the probe includes SEQ ID NO:14120 and SEQ ID NO:12064. In embodiments, the probe includes SEQ ID NO:14121 and SEQ ID NO:12065. In embodiments, the probe includes SEQ ID NO:14122 and SEQ ID NO:12066. In embodiments, the probe includes SEQ ID NO:14123 and SEQ ID NO:12067. In embodiments, the probe includes SEQ ID NO:14124 and SEQ ID NO:12068. In embodiments, the probe includes SEQ ID NO:14125 and SEQ ID NO:12069. In embodiments, the probe includes SEQ ID NO:14126 and SEQ ID NO:12070. In embodiments, the probe includes SEQ ID NO:14127 and SEQ ID NO:12071. In embodiments, the probe includes SEQ ID NO:14128 and SEQ ID NO:12072. In embodiments, the probe includes SEQ ID NO:14129 and SEQ ID NO:12073. In embodiments, the probe includes SEQ ID NO:14130 and SEQ ID NO:12074. In embodiments, the probe includes SEQ ID NO:14131 and SEQ ID NO:12075. In embodiments, the probe includes SEQ ID NO:14132 and SEQ ID NO:12076. In embodiments, the probe includes SEQ ID NO:14133 and SEQ ID NO:12077. In embodiments, the probe includes SEQ ID NO:14134 and SEQ ID NO:12078. In embodiments, the probe includes SEQ ID NO:14135 and SEQ ID NO:12079. In embodiments, the probe includes SEQ ID NO:14136 and SEQ ID NO:12080. In embodiments, the probe includes SEQ ID NO:14137 and SEQ ID NO:12081. In embodiments, the probe includes SEQ ID NO:14138 and SEQ ID NO:12082. In embodiments, the probe includes SEQ ID NO:14139 and SEQ ID NO:12083. In embodiments, the probe includes SEQ ID NO:14140 and SEQ ID NO:12084. In embodiments, the probe includes SEQ ID NO:14141 and SEQ ID NO:12085. In embodiments, the probe includes SEQ ID NO:14142 and SEQ ID NO:12086. In embodiments, the probe includes SEQ ID NO:14143 and SEQ ID NO:12087. In embodiments, the probe includes SEQ ID NO:14144 and SEQ ID NO:12088. In embodiments, the probe includes SEQ ID NO:14145 and SEQ ID NO:12089. In embodiments, the probe includes SEQ ID NO:14146 and SEQ ID NO:12090. In embodiments, the probe includes SEQ ID NO:14147 and SEQ ID NO:12091. In embodiments, the probe includes SEQ ID NO:14148 and SEQ ID NO:12092. In embodiments, the probe includes SEQ ID NO:14149 and SEQ ID NO:12093. In embodiments, the probe includes SEQ ID NO:14150 and SEQ ID NO:12094. In embodiments, the probe includes SEQ ID NO:14151 and SEQ ID NO:12095. In embodiments, the probe includes SEQ ID NO:14152 and SEQ ID NO:12096. In embodiments, the probe includes SEQ ID NO:14153 and SEQ ID NO:12097. In embodiments, the probe includes SEQ ID NO:14154 and SEQ ID NO:12098. In embodiments, the probe includes SEQ ID NO:14155 and SEQ ID NO:12099. In embodiments, the probe includes SEQ ID NO:14156 and SEQ ID NO:12100. In embodiments, the probe includes SEQ ID NO:14157 and SEQ ID NO:12101. In embodiments, the probe includes SEQ ID NO:14158 and SEQ ID NO:12102. In embodiments, the probe includes SEQ ID NO:14159 and SEQ ID NO:12103. In embodiments, the probe includes SEQ ID NO:14160 and SEQ ID NO:12104. In embodiments, the probe includes SEQ ID NO:14161 and SEQ ID NO:12105. In embodiments, the probe includes SEQ ID NO:14162 and SEQ ID NO:12106. In embodiments, the probe includes SEQ ID NO:14163 and SEQ ID NO:12107. In embodiments, the probe includes SEQ ID NO:14164 and SEQ ID NO:12108. In embodiments, the probe includes SEQ ID NO:14165 and SEQ ID NO:12109. In embodiments, the probe includes SEQ ID NO:14166 and SEQ ID NO:12110. In embodiments, the probe includes SEQ ID NO:14167 and SEQ ID NO:12111. In embodiments, the probe includes SEQ ID NO:14168 and SEQ ID NO:12112. In embodiments, the probe includes SEQ ID NO:14169 and SEQ ID NO:12113. In embodiments, the probe includes SEQ ID NO:14170 and SEQ ID NO:12114. In embodiments, the probe includes SEQ ID NO:14171 and SEQ ID NO:12115. In embodiments, the probe includes SEQ ID NO:14172 and SEQ ID NO:12116. In embodiments, the probe includes SEQ ID NO:14173 and SEQ ID NO:12117. In embodiments, the probe includes SEQ ID NO:14174 and SEQ ID NO:12118. In embodiments, the probe includes SEQ ID NO:14175 and SEQ ID NO:12119. In embodiments, the probe includes SEQ ID NO:14176 and SEQ ID NO:12120. In embodiments, the probe includes SEQ ID NO:14177 and SEQ ID NO:12121. In embodiments, the probe includes SEQ ID NO:14178 and SEQ ID NO:12122. In embodiments, the probe includes SEQ ID NO:14179 and SEQ ID NO:12123. In embodiments, the probe includes SEQ ID NO:14180 and SEQ ID NO:12124. In embodiments, the probe includes SEQ ID NO:14181 and SEQ ID NO:12125. In embodiments, the probe includes SEQ ID NO:14182 and SEQ ID NO:12126. In embodiments, the probe includes SEQ ID NO:14183 and SEQ ID NO:12127. In embodiments, the probe includes SEQ ID NO:14184 and SEQ ID NO:12128. In embodiments, the probe includes SEQ ID NO:14185 and SEQ ID NO:12129. In embodiments, the probe includes SEQ ID NO:14186 and SEQ ID NO:12130. In embodiments, the probe includes SEQ ID NO:14187 and SEQ ID NO:12131. In embodiments, the probe includes SEQ ID NO:14188 and SEQ ID NO:12132. In embodiments, the probe includes SEQ ID NO:14189 and SEQ ID NO:12133. In embodiments, the probe includes SEQ ID NO:14190 and SEQ ID NO:12134. In embodiments, the probe includes SEQ ID NO:14191 and SEQ ID NO:12135. In embodiments, the probe includes SEQ ID NO:14192 and SEQ ID NO:12136. In embodiments, the probe includes SEQ ID NO:14193 and SEQ ID NO:12137. In embodiments, the probe includes SEQ ID NO:14194 and SEQ ID NO:12138. In embodiments, the probe includes SEQ ID NO:14195 and SEQ ID NO:12139. In embodiments, the probe includes SEQ ID NO:14196 and SEQ ID NO:12140. In embodiments, the probe includes SEQ ID NO:14197 and SEQ ID NO:12141. In embodiments, the probe includes SEQ ID NO:14198 and SEQ ID NO:12142. In embodiments, the probe includes SEQ ID NO:14199 and SEQ ID NO:12143. In embodiments, the probe includes SEQ ID NO:14200 and SEQ ID NO:12144. In embodiments, the probe includes SEQ ID NO:14201 and SEQ ID NO:12145. In embodiments, the probe includes SEQ ID NO:14202 and SEQ ID NO:12146. In embodiments, the probe includes SEQ ID NO:14203 and SEQ ID NO:12147. In embodiments, the probe includes SEQ ID NO:14204 and SEQ ID NO:12148. In embodiments, the probe includes SEQ ID NO:14205 and SEQ ID NO:12149. In embodiments, the probe includes SEQ ID NO:14206 and SEQ ID NO:12150. In embodiments, the probe includes SEQ ID NO:14207 and SEQ ID NO:12151. In embodiments, the probe includes SEQ ID NO:14208 and SEQ ID NO:12152. In embodiments, the probe includes SEQ ID NO:14209 and SEQ ID NO:12153. In embodiments, the probe includes SEQ ID NO:14210 and SEQ ID NO:12154. In embodiments, the probe includes SEQ ID NO:14211 and SEQ ID NO:12155. In embodiments, the probe includes SEQ ID NO:14212 and SEQ ID NO:12156. In embodiments, the probe includes SEQ ID NO:14213 and SEQ ID NO:12157. In embodiments, the probe includes SEQ ID NO:14214 and SEQ ID NO:12158. In embodiments, the probe includes SEQ ID NO:14215 and SEQ ID NO:12159. In embodiments, the probe includes SEQ ID NO:14216 and SEQ ID NO:12160. In embodiments, the probe includes SEQ ID NO:14217 and SEQ ID NO:12161. In embodiments, the probe includes SEQ ID NO:14218 and SEQ ID NO:12162. In embodiments, the probe includes SEQ ID NO:14219 and SEQ ID NO:12163. In embodiments, the probe includes SEQ ID NO:14220 and SEQ ID NO:12164. In embodiments, the probe includes SEQ ID NO:14221 and SEQ ID NO:12165. In embodiments, the probe includes SEQ ID NO:14222 and SEQ ID NO:12166. In embodiments, the probe includes SEQ ID NO:14223 and SEQ ID NO:12167. In embodiments, the probe includes SEQ ID NO:14224 and SEQ ID NO:12168. In embodiments, the probe includes SEQ ID NO:14225 and SEQ ID NO:12169. In embodiments, the probe includes SEQ ID NO:14226 and SEQ ID NO:12170. In embodiments, the probe includes SEQ ID NO:14227 and SEQ ID NO:12171. In embodiments, the probe includes SEQ ID NO:14228 and SEQ ID NO:12172. In embodiments, the probe includes SEQ ID NO:14229 and SEQ ID NO:12173. In embodiments, the probe includes SEQ ID NO:14230 and SEQ ID NO:12174. In embodiments, the probe includes SEQ ID NO:14231 and SEQ ID NO:12175. In embodiments, the probe includes SEQ ID NO:14232 and SEQ ID NO:12176. In embodiments, the probe includes SEQ ID NO:14233 and SEQ ID NO:12177. In embodiments, the probe includes SEQ ID NO:14234 and SEQ ID NO:12178. In embodiments, the probe includes SEQ ID NO:14235 and SEQ ID NO:12179. In embodiments, the probe includes SEQ ID NO:14236 and SEQ ID NO:12180. In embodiments, the probe includes SEQ ID NO:14237 and SEQ ID NO:12181. In embodiments, the probe includes SEQ ID NO:14238 and SEQ ID NO:12182. In embodiments, the probe includes SEQ ID NO:14239 and SEQ ID NO:12183. In embodiments, the probe includes SEQ ID NO:14240 and SEQ ID NO:12184. In embodiments, the probe includes SEQ ID NO:14241 and SEQ ID NO:12185. In embodiments, the probe includes SEQ ID NO:14242 and SEQ ID NO:12186. In embodiments, the probe includes SEQ ID NO:14243 and SEQ ID NO:12187. In embodiments, the probe includes SEQ ID NO:14244 and SEQ ID NO:12188. In embodiments, the probe includes SEQ ID NO:14245 and SEQ ID NO:12189. In embodiments, the probe includes SEQ ID NO:14246 and SEQ ID NO:12190. In embodiments, the probe includes SEQ ID NO:14247 and SEQ ID NO:12191. In embodiments, the probe includes SEQ ID NO:14248 and SEQ ID NO:12192. In embodiments, the probe includes SEQ ID NO:14249 and SEQ ID NO:12193. In embodiments, the probe includes SEQ ID NO:14250 and SEQ ID NO:12194. In embodiments, the probe includes SEQ ID NO:14251 and SEQ ID NO:12195. In embodiments, the probe includes SEQ ID NO:14252 and SEQ ID NO:12196. In embodiments, the probe includes SEQ ID NO:14253 and SEQ ID NO:12197. In embodiments, the probe includes SEQ ID NO:14254 and SEQ ID NO:12198. In embodiments, the probe includes SEQ ID NO:14255 and SEQ ID NO:12199. In embodiments, the probe includes SEQ ID NO:14256 and SEQ ID NO:12200. In embodiments, the probe includes SEQ ID NO:14257 and SEQ ID NO:12201. In embodiments, the probe includes SEQ ID NO:14258 and SEQ ID NO:12202. In embodiments, the probe includes SEQ ID NO:14259 and SEQ ID NO:12203. In embodiments, the probe includes SEQ ID NO:14260 and SEQ ID NO:12204. In embodiments, the probe includes SEQ ID NO:14261 and SEQ ID NO:12205. In embodiments, the probe includes SEQ ID NO:14262 and SEQ ID NO:12206. In embodiments, the probe includes SEQ ID NO:14263 and SEQ ID NO:12207. In embodiments, the probe includes SEQ ID NO:14264 and SEQ ID NO:12208. In embodiments, the probe includes SEQ ID NO:14265 and SEQ ID NO:12209. In embodiments, the probe includes SEQ ID NO:14266 and SEQ ID NO:12210. In embodiments, the probe includes SEQ ID NO:14267 and SEQ ID NO:12211. In embodiments, the probe includes SEQ ID NO:14268 and SEQ ID NO:12212. In embodiments, the probe includes SEQ ID NO:14269 and SEQ ID NO:12213. In embodiments, the probe includes SEQ ID NO:14270 and SEQ ID NO:12214. In embodiments, the probe includes SEQ ID NO:14271 and SEQ ID NO:12215. In embodiments, the probe includes SEQ ID NO:14272 and SEQ ID NO:12216. In embodiments, the probe includes SEQ ID NO:14273 and SEQ ID NO:12217. In embodiments, the probe includes SEQ ID NO:14274 and SEQ ID NO:12218. In embodiments, the probe includes SEQ ID NO:14275 and SEQ ID NO:12219. In embodiments, the probe includes SEQ ID NO:14276 and SEQ ID NO:12220. In embodiments, the probe includes SEQ ID NO:14277 and SEQ ID NO:12221. In embodiments, the probe includes SEQ ID NO:14278 and SEQ ID NO:12222. In embodiments, the probe includes SEQ ID NO:14279 and SEQ ID NO:12223. In embodiments, the probe includes SEQ ID NO:14280 and SEQ ID NO:12224. In embodiments, the probe includes SEQ ID NO:14281 and SEQ ID NO:12225. In embodiments, the probe includes SEQ ID NO:14282 and SEQ ID NO:12226. In embodiments, the probe includes SEQ ID NO:14283 and SEQ ID NO:12227. In embodiments, the probe includes SEQ ID NO:14284 and SEQ ID NO:12228. In embodiments, the probe includes SEQ ID NO:14285 and SEQ ID NO:12229. In embodiments, the probe includes SEQ ID NO:14286 and SEQ ID NO:12230. In embodiments, the probe includes SEQ ID NO:14287 and SEQ ID NO:12231. In embodiments, the probe includes SEQ ID NO:14288 and SEQ ID NO:12232. In embodiments, the probe includes SEQ ID NO:14289 and SEQ ID NO:12233. In embodiments, the probe includes SEQ ID NO:14290 and SEQ ID NO:12234. In embodiments, the probe includes SEQ ID NO:14291 and SEQ ID NO:12235. In embodiments, the probe includes SEQ ID NO:14292 and SEQ ID NO:12236. In embodiments, the probe includes SEQ ID NO:14293 and SEQ ID NO:12237. In embodiments, the probe includes SEQ ID NO:14294 and SEQ ID NO:12238. In embodiments, the probe includes SEQ ID NO:14295 and SEQ ID NO:12239. In embodiments, the probe includes SEQ ID NO:14296 and SEQ ID NO:12240. In embodiments, the probe includes SEQ ID NO:14297 and SEQ ID NO:12241. In embodiments, the probe includes SEQ ID NO:14298 and SEQ ID NO:12242. In embodiments, the probe includes SEQ ID NO:14299 and SEQ ID NO:12243. In embodiments, the probe includes SEQ ID NO:14300 and SEQ ID NO:12244. In embodiments, the probe includes SEQ ID NO:14301 and SEQ ID NO:12245. In embodiments, the probe includes SEQ ID NO:14302 and SEQ ID NO:12246. In embodiments, the probe includes SEQ ID NO:14303 and SEQ ID NO:12247. In embodiments, the probe includes SEQ ID NO:14304 and SEQ ID NO:12248. In embodiments, the probe includes SEQ ID NO:14305 and SEQ ID NO:12249. In embodiments, the probe includes SEQ ID NO:14306 and SEQ ID NO:12250. In embodiments, the probe includes SEQ ID NO:14307 and SEQ ID NO:12251. In embodiments, the probe includes SEQ ID NO:14308 and SEQ ID NO:12252. In embodiments, the probe includes SEQ ID NO:14309 and SEQ ID NO:12253. In embodiments, the probe includes SEQ ID NO:14310 and SEQ ID NO:12254. In embodiments, the probe includes SEQ ID NO:14311 and SEQ ID NO:12255. In embodiments, the probe includes SEQ ID NO:14312 and SEQ ID NO:12256. In embodiments, the probe includes SEQ ID NO:14313 and SEQ ID NO:12257. In embodiments, the probe includes SEQ ID NO:14314 and SEQ ID NO:12258. In embodiments, the probe includes SEQ ID NO:14315 and SEQ ID NO:12259. In embodiments, the probe includes SEQ ID NO:14316 and SEQ ID NO:12260. In embodiments, the probe includes SEQ ID NO:14317 and SEQ ID NO:12261. In embodiments, the probe includes SEQ ID NO:14318 and SEQ ID NO:12262. In embodiments, the probe includes SEQ ID NO:14319 and SEQ ID NO:12263. In embodiments, the probe includes SEQ ID NO:14320 and SEQ ID NO:12264. In embodiments, the probe includes SEQ ID NO:14321 and SEQ ID NO:12265. In embodiments, the probe includes SEQ ID NO:14322 and SEQ ID NO:12266. In embodiments, the probe includes SEQ ID NO:14323 and SEQ ID NO:12267. In embodiments, the probe includes SEQ ID NO:14324 and SEQ ID NO:12268. In embodiments, the probe includes SEQ ID NO:14325 and SEQ ID NO:12269. In embodiments, the probe includes SEQ ID NO:14326 and SEQ ID NO:12270. In embodiments, the probe includes SEQ ID NO:14327 and SEQ ID NO:12271. In embodiments, the probe includes SEQ ID NO:14328 and SEQ ID NO:12272. In embodiments, the probe includes SEQ ID NO:14329 and SEQ ID NO:12273. In embodiments, the probe includes SEQ ID NO:14330 and SEQ ID NO:12274. In embodiments, the probe includes SEQ ID NO:14331 and SEQ ID NO:12275. In embodiments, the probe includes SEQ ID NO:14332 and SEQ ID NO:12276. In embodiments, the probe includes SEQ ID NO:14333 and SEQ ID NO:12277. In embodiments, the probe includes SEQ ID NO:14334 and SEQ ID NO:12278. In embodiments, the probe includes SEQ ID NO:14335 and SEQ ID NO:12279. In embodiments, the probe includes SEQ ID NO:14336 and SEQ ID NO:12280. In embodiments, the probe includes SEQ ID NO:14337 and SEQ ID NO:12281. In embodiments, the probe includes SEQ ID NO:14338 and SEQ ID NO:12282. In embodiments, the probe includes SEQ ID NO:14339 and SEQ ID NO:12283. In embodiments, the probe includes SEQ ID NO:14340 and SEQ ID NO:12284. In embodiments, the probe includes SEQ ID NO:14341 and SEQ ID NO:12285. In embodiments, the probe includes SEQ ID NO:14342 and SEQ ID NO:12286. In embodiments, the probe includes SEQ ID NO:14343 and SEQ ID NO:12287. In embodiments, the probe includes SEQ ID NO:14344 and SEQ ID NO:12288. In embodiments, the probe includes SEQ ID NO:14345 and SEQ ID NO:12289. In embodiments, the probe includes SEQ ID NO:14346 and SEQ ID NO:12290. In embodiments, the probe includes SEQ ID NO:14347 and SEQ ID NO:12291. In embodiments, the probe includes SEQ ID NO:14348 and SEQ ID NO:12292. In embodiments, the probe includes SEQ ID NO:14349 and SEQ ID NO:12293. In embodiments, the probe includes SEQ ID NO:14350 and SEQ ID NO:12294. In embodiments, the probe includes SEQ ID NO:14351 and SEQ ID NO:12295. In embodiments, the probe includes SEQ ID NO:14352 and SEQ ID NO:12296. In embodiments, the probe includes SEQ ID NO:14353 and SEQ ID NO:12297. In embodiments, the probe includes SEQ ID NO:14354 and SEQ ID NO:12298. In embodiments, the probe includes SEQ ID NO:14355 and SEQ ID NO:12299. In embodiments, the probe includes SEQ ID NO:14356 and SEQ ID NO:12300. In embodiments, the probe includes SEQ ID NO:14357 and SEQ ID NO:12301. In embodiments, the probe includes SEQ ID NO:14358 and SEQ ID NO:12302. In embodiments, the probe includes SEQ ID NO:14359 and SEQ ID NO:12303. In embodiments, the probe includes SEQ ID NO:14360 and SEQ ID NO:12304. In embodiments, the probe includes SEQ ID NO:14361 and SEQ ID NO:12305. In embodiments, the probe includes SEQ ID NO:14362 and SEQ ID NO:12306. In embodiments, the probe includes SEQ ID NO:14363 and SEQ ID NO:12307. In embodiments, the probe includes SEQ ID NO:14364 and SEQ ID NO:12308. In embodiments, the probe includes SEQ ID NO:14365 and SEQ ID NO:12309. In embodiments, the probe includes SEQ ID NO:14366 and SEQ ID NO:12310. In embodiments, the probe includes SEQ ID NO:14367 and SEQ ID NO:12311. In embodiments, the probe includes SEQ ID NO:14368 and SEQ ID NO:12312. In embodiments, the probe includes SEQ ID NO:14369 and SEQ ID NO:12313. In embodiments, the probe includes SEQ ID NO:14370 and SEQ ID NO:12314. In embodiments, the probe includes SEQ ID NO:14371 and SEQ ID NO:12315. In embodiments, the probe includes SEQ ID NO:14372 and SEQ ID NO:12316. In embodiments, the probe includes SEQ ID NO:14373 and SEQ ID NO:12317. In embodiments, the probe includes SEQ ID NO:14374 and SEQ ID NO:12318. In embodiments, the probe includes SEQ ID NO:14375 and SEQ ID NO:12319. In embodiments, the probe includes SEQ ID NO:14376 and SEQ ID NO:12320. In embodiments, the probe includes SEQ ID NO:14377 and SEQ ID NO:12321. In embodiments, the probe includes SEQ ID NO:14378 and SEQ ID NO:12322. In embodiments, the probe includes SEQ ID NO:14379 and SEQ ID NO:12323. In embodiments, the probe includes SEQ ID NO:14380 and SEQ ID NO:12324. In embodiments, the probe includes SEQ ID NO:14381 and SEQ ID NO:12325. In embodiments, the probe includes SEQ ID NO:14382 and SEQ ID NO:12326. In embodiments, the probe includes SEQ ID NO:14383 and SEQ ID NO:12327. In embodiments, the probe includes SEQ ID NO:14384 and SEQ ID NO:12328. In embodiments, the probe includes SEQ ID NO:14385 and SEQ ID NO:12329. In embodiments, the probe includes SEQ ID NO:14386 and SEQ ID NO:12330. In embodiments, the probe includes SEQ ID NO:14387 and SEQ ID NO:12331. In embodiments, the probe includes SEQ ID NO:14388 and SEQ ID NO:12332. In embodiments, the probe includes SEQ ID NO:14389 and SEQ ID NO:12333. In embodiments, the probe includes SEQ ID NO:14390 and SEQ ID NO:12334. In embodiments, the probe includes SEQ ID NO:14391 and SEQ ID NO:12335. In embodiments, the probe includes SEQ ID NO:14392 and SEQ ID NO:12336. In embodiments, the probe includes SEQ ID NO:14393 and SEQ ID NO:12337. In embodiments, the probe includes SEQ ID NO:14394 and SEQ ID NO:12338. In embodiments, the probe includes SEQ ID NO:14395 and SEQ ID NO:12339. In embodiments, the probe includes SEQ ID NO:14396 and SEQ ID NO:12340. In embodiments, the probe includes SEQ ID NO:14397 and SEQ ID NO:12341. In embodiments, the probe includes SEQ ID NO:14398 and SEQ ID NO:12342. In embodiments, the probe includes SEQ ID NO:14399 and SEQ ID NO:12343. In embodiments, the probe includes SEQ ID NO:14400 and SEQ ID NO:12344. In embodiments, the probe includes SEQ ID NO:14401 and SEQ ID NO:12345. In embodiments, the probe includes SEQ ID NO:14402 and SEQ ID NO:12346. In embodiments, the probe includes SEQ ID NO:14403 and SEQ ID NO:12347. In embodiments, the probe includes SEQ ID NO:14404 and SEQ ID NO:12348. In embodiments, the probe includes SEQ ID NO:14405 and SEQ ID NO:12349. In embodiments, the probe includes SEQ ID NO:14406 and SEQ ID NO:12350. In embodiments, the probe includes SEQ ID NO:14407 and SEQ ID NO:12351. In embodiments, the probe includes SEQ ID NO:14408 and SEQ ID NO:12352. In embodiments, the probe includes SEQ ID NO:14409 and SEQ ID NO:12353. In embodiments, the probe includes SEQ ID NO:14410 and SEQ ID NO:12354. In embodiments, the probe includes SEQ ID NO:14411 and SEQ ID NO:12355. In embodiments, the probe includes SEQ ID NO:14412 and SEQ ID NO:12356. In embodiments, the probe includes SEQ ID NO:14413 and SEQ ID NO:12357. In embodiments, the probe includes SEQ ID NO:14414 and SEQ ID NO:12358. In embodiments, the probe includes SEQ ID NO:14415 and SEQ ID NO:12359. In embodiments, the probe includes SEQ ID NO:14416 and SEQ ID NO:12360. In embodiments, the probe includes SEQ ID NO:14417 and SEQ ID NO:12361. In embodiments, the probe includes SEQ ID NO:14418 and SEQ ID NO:12362. In embodiments, the probe includes SEQ ID NO:14419 and SEQ ID NO:12363. In embodiments, the probe includes SEQ ID NO:14420 and SEQ ID NO:12364. In embodiments, the probe includes SEQ ID NO:14421 and SEQ ID NO:12365. In embodiments, the probe includes SEQ ID NO:14422 and SEQ ID NO:12366. In embodiments, the probe includes SEQ ID NO:14423 and SEQ ID NO:12367. In embodiments, the probe includes SEQ ID NO:14424 and SEQ ID NO:12368. In embodiments, the probe includes SEQ ID NO:14425 and SEQ ID NO:12369. In embodiments, the probe includes SEQ ID NO:14426 and SEQ ID NO:12370. In embodiments, the probe includes SEQ ID NO:14427 and SEQ ID NO:12371. In embodiments, the probe includes SEQ ID NO:14428 and SEQ ID NO:12372. In embodiments, the probe includes SEQ ID NO:14429 and SEQ ID NO:12373. In embodiments, the probe includes SEQ ID NO:14430 and SEQ ID NO:12374. In embodiments, the probe includes SEQ ID NO:14431 and SEQ ID NO:12375. In embodiments, the probe includes SEQ ID NO:14432 and SEQ ID NO:12376. In embodiments, the probe includes SEQ ID NO:14433 and SEQ ID NO:12377. In embodiments, the probe includes SEQ ID NO:14434 and SEQ ID NO:12378. In embodiments, the probe includes SEQ ID NO:14435 and SEQ ID NO:12379. In embodiments, the probe includes SEQ ID NO:14436 and SEQ ID NO:12380. In embodiments, the probe includes SEQ ID NO:14437 and SEQ ID NO:12381. In embodiments, the probe includes SEQ ID NO:14438 and SEQ ID NO:12382. In embodiments, the probe includes SEQ ID NO:14439 and SEQ ID NO:12383. In embodiments, the probe includes SEQ ID NO:14440 and SEQ ID NO:12384. In embodiments, the probe includes SEQ ID NO:14441 and SEQ ID NO:12385. In embodiments, the probe includes SEQ ID NO:14442 and SEQ ID NO:12386. In embodiments, the probe includes SEQ ID NO:14443 and SEQ ID NO:12387. In embodiments, the probe includes SEQ ID NO:14444 and SEQ ID NO:12388. In embodiments, the probe includes SEQ ID NO:14445 and SEQ ID NO:12389. In embodiments, the probe includes SEQ ID NO:14446 and SEQ ID NO:12390. In embodiments, the probe includes SEQ ID NO:14447 and SEQ ID NO:12391. In embodiments, the probe includes SEQ ID NO:14448 and SEQ ID NO:12392. In embodiments, the probe includes SEQ ID NO:14449 and SEQ ID NO:12393. In embodiments, the probe includes SEQ ID NO:14450 and SEQ ID NO:12394. In embodiments, the probe includes SEQ ID NO:14451 and SEQ ID NO:12395. In embodiments, the probe includes SEQ ID NO:14452 and SEQ ID NO:12396. In embodiments, the probe includes SEQ ID NO:14453 and SEQ ID NO:12397. In embodiments, the probe includes SEQ ID NO:14454 and SEQ ID NO:12398. In embodiments, the probe includes SEQ ID NO:14455 and SEQ ID NO:12399. In embodiments, the probe includes SEQ ID NO:14456 and SEQ ID NO:12400. In embodiments, the probe includes SEQ ID NO:14457 and SEQ ID NO:12401. In embodiments, the probe includes SEQ ID NO:14458 and SEQ ID NO:12402. In embodiments, the probe includes SEQ ID NO:14459 and SEQ ID NO:12403. In embodiments, the probe includes SEQ ID NO:14460 and SEQ ID NO:12404. In embodiments, the probe includes SEQ ID NO:14461 and SEQ ID NO:12405. In embodiments, the probe includes SEQ ID NO:14462 and SEQ ID NO:12406. In embodiments, the probe includes SEQ ID NO:14463 and SEQ ID NO:12407. In embodiments, the probe includes SEQ ID NO:14464 and SEQ ID NO:12408. In embodiments, the probe includes SEQ ID NO:14465 and SEQ ID NO:12409. In embodiments, the probe includes SEQ ID NO:14466 and SEQ ID NO:12410. In embodiments, the probe includes SEQ ID NO:14467 and SEQ ID NO:12411. In embodiments, the probe includes SEQ ID NO:14468 and SEQ ID NO:12412. In embodiments, the probe includes SEQ ID NO:14469 and SEQ ID NO:12413. In embodiments, the probe includes SEQ ID NO:14470 and SEQ ID NO:12414. In embodiments, the probe includes SEQ ID NO:14471 and SEQ ID NO:12415. In embodiments, the probe includes SEQ ID NO:14472 and SEQ ID NO:12416. In embodiments, the probe includes SEQ ID NO:14473 and SEQ ID NO:12417. In embodiments, the probe includes SEQ ID NO:14474 and SEQ ID NO:12418. In embodiments, the probe includes SEQ ID NO:14475 and SEQ ID NO:12419. In embodiments, the probe includes SEQ ID NO:14476 and SEQ ID NO:12420. In embodiments, the probe includes SEQ ID NO:14477 and SEQ ID NO:12421. In embodiments, the probe includes SEQ ID NO:14478 and SEQ ID NO:12422. In embodiments, the probe includes SEQ ID NO:14479 and SEQ ID NO:12423. In embodiments, the probe includes SEQ ID NO:14480 and SEQ ID NO:12424. In embodiments, the probe includes SEQ ID NO:14481 and SEQ ID NO:12425. In embodiments, the probe includes SEQ ID NO:14482 and SEQ ID NO:12426. In embodiments, the probe includes SEQ ID NO:14483 and SEQ ID NO:12427. In embodiments, the probe includes SEQ ID NO:14484 and SEQ ID NO:12428. In embodiments, the probe includes SEQ ID NO:14485 and SEQ ID NO:12429. In embodiments, the probe includes SEQ ID NO:14486 and SEQ ID NO:12430. In embodiments, the probe includes SEQ ID NO:14487 and SEQ ID NO:12431. In embodiments, the probe includes SEQ ID NO:14488 and SEQ ID NO:12432. In embodiments, the probe includes SEQ ID NO:14489 and SEQ ID NO:12433. In embodiments, the probe includes SEQ ID NO:14490 and SEQ ID NO:12434. In embodiments, the probe includes SEQ ID NO:14491 and SEQ ID NO:12435. In embodiments, the probe includes SEQ ID NO:14492 and SEQ ID NO:12436. In embodiments, the probe includes SEQ ID NO:14493 and SEQ ID NO:12437. In embodiments, the probe includes SEQ ID NO:14494 and SEQ ID NO:12438. In embodiments, the probe includes SEQ ID NO:14495 and SEQ ID NO:12439. In embodiments, the probe includes SEQ ID NO:14496 and SEQ ID NO:12440. In embodiments, the probe includes SEQ ID NO:14497 and SEQ ID NO:12441. In embodiments, the probe includes SEQ ID NO:14498 and SEQ ID NO:12442. In embodiments, the probe includes SEQ ID NO:14499 and SEQ ID NO:12443. In embodiments, the probe includes SEQ ID NO:14500 and SEQ ID NO:12444. In embodiments, the probe includes SEQ ID NO:14501 and SEQ ID NO:12445. In embodiments, the probe includes SEQ ID NO:14502 and SEQ ID NO:12446. In embodiments, the probe includes SEQ ID NO:14503 and SEQ ID NO:12447. In embodiments, the probe includes SEQ ID NO:14504 and SEQ ID NO:12448. In embodiments, the probe includes SEQ ID NO:14505 and SEQ ID NO:12449. In embodiments, the probe includes SEQ ID NO:14506 and SEQ ID NO:12450. In embodiments, the probe includes SEQ ID NO:14507 and SEQ ID NO:12451. In embodiments, the probe includes SEQ ID NO:14508 and SEQ ID NO:12452. In embodiments, the probe includes SEQ ID NO:14509 and SEQ ID NO:12453. In embodiments, the probe includes SEQ ID NO:14510 and SEQ ID NO:12454. In embodiments, the probe includes SEQ ID NO:14511 and SEQ ID NO:12455. In embodiments, the probe includes SEQ ID NO:14512 and SEQ ID NO:12456. In embodiments, the probe includes SEQ ID NO:14513 and SEQ ID NO:12457. In embodiments, the probe includes SEQ ID NO:14514 and SEQ ID NO:12458. In embodiments, the probe includes SEQ ID NO:14515 and SEQ ID NO:12459. In embodiments, the probe includes SEQ ID NO:14516 and SEQ ID NO:12460. In embodiments, the probe includes SEQ ID NO:14517 and SEQ ID NO:12461. In embodiments, the probe includes SEQ ID NO:14518 and SEQ ID NO:12462. In embodiments, the probe includes SEQ ID NO:14519 and SEQ ID NO:12463. In embodiments, the probe includes SEQ ID NO:14520 and SEQ ID NO:12464. In embodiments, the probe includes SEQ ID NO:14521 and SEQ ID NO:12465. In embodiments, the probe includes SEQ ID NO:14522 and SEQ ID NO:12466. In embodiments, the probe includes SEQ ID NO:14523 and SEQ ID NO:12467. In embodiments, the probe includes SEQ ID NO:14524 and SEQ ID NO:12468. In embodiments, the probe includes SEQ ID NO:14525 and SEQ ID NO:12469. In embodiments, the probe includes SEQ ID NO:14526 and SEQ ID NO:12470. In embodiments, the probe includes SEQ ID NO:14527 and SEQ ID NO:12471. In embodiments, the probe includes SEQ ID NO:14528 and SEQ ID NO:12472. In embodiments, the probe includes SEQ ID NO:14529 and SEQ ID NO:12473. In embodiments, the probe includes SEQ ID NO:14530 and SEQ ID NO:12474. In embodiments, the probe includes SEQ ID NO:14531 and SEQ ID NO:12475. In embodiments, the probe includes SEQ ID NO:14532 and SEQ ID NO:12476. In embodiments, the probe includes SEQ ID NO:14533 and SEQ ID NO:12477. In embodiments, the probe includes SEQ ID NO:14534 and SEQ ID NO:12478. In embodiments, the probe includes SEQ ID NO:14535 and SEQ ID NO:12479. In embodiments, the probe includes SEQ ID NO:14536 and SEQ ID NO:12480. In embodiments, the probe includes SEQ ID NO:14537 and SEQ ID NO:12481. In embodiments, the probe includes SEQ ID NO:14538 and SEQ ID NO:12482. In embodiments, the probe includes SEQ ID NO:14539 and SEQ ID NO:12483. In embodiments, the probe includes SEQ ID NO:14540 and SEQ ID NO:12484. In embodiments, the probe includes SEQ ID NO:14541 and SEQ ID NO:12485. In embodiments, the probe includes SEQ ID NO:14542 and SEQ ID NO:12486. In embodiments, the probe includes SEQ ID NO:14543 and SEQ ID NO:12487. In embodiments, the probe includes SEQ ID NO:14544 and SEQ ID NO:12488. In embodiments, the probe includes SEQ ID NO:14545 and SEQ ID NO:12489. In embodiments, the probe includes SEQ ID NO:14546 and SEQ ID NO:12490. In embodiments, the probe includes SEQ ID NO:14547 and SEQ ID NO:12491. In embodiments, the probe includes SEQ ID NO:14548 and SEQ ID NO:12492. In embodiments, the probe includes SEQ ID NO:14549 and SEQ ID NO:12493. In embodiments, the probe includes SEQ ID NO:14550 and SEQ ID NO:12494. In embodiments, the probe includes SEQ ID NO:14551 and SEQ ID NO:12495. In embodiments, the probe includes SEQ ID NO:14552 and SEQ ID NO:12496. In embodiments, the probe includes SEQ ID NO:14553 and SEQ ID NO:12497. In embodiments, the probe includes SEQ ID NO:14554 and SEQ ID NO:12498. In embodiments, the probe includes SEQ ID NO:14555 and SEQ ID NO:12499. In embodiments, the probe includes SEQ ID NO:14556 and SEQ ID NO:12500. In embodiments, the probe includes SEQ ID NO:14557 and SEQ ID NO:12501. In embodiments, the probe includes SEQ ID NO:14558 and SEQ ID NO:12502. In embodiments, the probe includes SEQ ID NO:14559 and SEQ ID NO:12503. In embodiments, the probe includes SEQ ID NO:14560 and SEQ ID NO:12504. In embodiments, the probe includes SEQ ID NO:14561 and SEQ ID NO:12505. In embodiments, the probe includes SEQ ID NO:14562 and SEQ ID NO:12506. In embodiments, the probe includes SEQ ID NO:14563 and SEQ ID NO:12507. In embodiments, the probe includes SEQ ID NO:14564 and SEQ ID NO:12508. In embodiments, the probe includes SEQ ID NO:14565 and SEQ ID NO:12509. In embodiments, the probe includes SEQ ID NO:14566 and SEQ ID NO:12510. In embodiments, the probe includes SEQ ID NO:14567 and SEQ ID NO:12511. In embodiments, the probe includes SEQ ID NO:14568 and SEQ ID NO:12512. In embodiments, the probe includes SEQ ID NO:14569 and SEQ ID NO:12513. In embodiments, the probe includes SEQ ID NO:14570 and SEQ ID NO:12514. In embodiments, the probe includes SEQ ID NO:14571 and SEQ ID NO:12515. In embodiments, the probe includes SEQ ID NO:14572 and SEQ ID NO:12516. In embodiments, the probe includes SEQ ID NO:14573 and SEQ ID NO:12517. In embodiments, the probe includes SEQ ID NO:14574 and SEQ ID NO:12518. In embodiments, the probe includes SEQ ID NO:14575 and SEQ ID NO:12519. In embodiments, the probe includes SEQ ID NO:14576 and SEQ ID NO:12520. In embodiments, the probe includes SEQ ID NO:14577 and SEQ ID NO:12521. In embodiments, the probe includes SEQ ID NO:14578 and SEQ ID NO:12522. In embodiments, the probe includes SEQ ID NO:14579 and SEQ ID NO:12523. In embodiments, the probe includes SEQ ID NO:14580 and SEQ ID NO:12524. In embodiments, the probe includes SEQ ID NO:14581 and SEQ ID NO:12525. In embodiments, the probe includes SEQ ID NO:14582 and SEQ ID NO:12526. In embodiments, the probe includes SEQ ID NO:14583 and SEQ ID NO:12527. In embodiments, the probe includes SEQ ID NO:14584 and SEQ ID NO:12528. In embodiments, the probe includes SEQ ID NO:14585 and SEQ ID NO:12529. In embodiments, the probe includes SEQ ID NO:14586 and SEQ ID NO:12530. In embodiments, the probe includes SEQ ID NO:14587 and SEQ ID NO:12531. In embodiments, the probe includes SEQ ID NO:14588 and SEQ ID NO:12532. In embodiments, the probe includes SEQ ID NO:14589 and SEQ ID NO:12533. In embodiments, the probe includes SEQ ID NO:14590 and SEQ ID NO:12534. In embodiments, the probe includes SEQ ID NO:14591 and SEQ ID NO:12535. In embodiments, the probe includes SEQ ID NO:14592 and SEQ ID NO:12536. In embodiments, the probe includes SEQ ID NO:14593 and SEQ ID NO:12537. In embodiments, the probe includes SEQ ID NO:14594 and SEQ ID NO:12538. In embodiments, the probe includes SEQ ID NO:14595 and SEQ ID NO:12539. In embodiments, the probe includes SEQ ID NO:14596 and SEQ ID NO:12540. In embodiments, the probe includes SEQ ID NO:14597 and SEQ ID NO:12541. In embodiments, the probe includes SEQ ID NO:14598 and SEQ ID NO:12542. In embodiments, the probe includes SEQ ID NO:14599 and SEQ ID NO:12543. In embodiments, the probe includes SEQ ID NO:14600 and SEQ ID NO:12544. In embodiments, the probe includes SEQ ID NO:14601 and SEQ ID NO:12545. In embodiments, the probe includes SEQ ID NO:14602 and SEQ ID NO:12546. In embodiments, the probe includes SEQ ID NO:14603 and SEQ ID NO:12547. In embodiments, the probe includes SEQ ID NO:14604 and SEQ ID NO:12548. In embodiments, the probe includes SEQ ID NO:14605 and SEQ ID NO:12549. In embodiments, the probe includes SEQ ID NO:14606 and SEQ ID NO:12550. In embodiments, the probe includes SEQ ID NO:14607 and SEQ ID NO:12551. In embodiments, the probe includes SEQ ID NO:14608 and SEQ ID NO:12552. In embodiments, the probe includes SEQ ID NO:14609 and SEQ ID NO:12553. In embodiments, the probe includes SEQ ID NO:14610 and SEQ ID NO:12554. In embodiments, the probe includes SEQ ID NO:14611 and SEQ ID NO:12555. In embodiments, the probe includes SEQ ID NO:14612 and SEQ ID NO:12556. In embodiments, the probe includes SEQ ID NO:14613 and SEQ ID NO:12557. In embodiments, the probe includes SEQ ID NO:14614 and SEQ ID NO:12558. In embodiments, the probe includes SEQ ID NO:14615 and SEQ ID NO:12559. In embodiments, the probe includes SEQ ID NO:14616 and SEQ ID NO:12560. In embodiments, the probe includes SEQ ID NO:14617 and SEQ ID NO:12561. In embodiments, the probe includes SEQ ID NO:14618 and SEQ ID NO:12562. In embodiments, the probe includes SEQ ID NO:14619 and SEQ ID NO:12563. In embodiments, the probe includes SEQ ID NO:14620 and SEQ ID NO:12564. In embodiments, the probe includes SEQ ID NO:14621 and SEQ ID NO:12565. In embodiments, the probe includes SEQ ID NO:14622 and SEQ ID NO:12566. In embodiments, the probe includes SEQ ID NO:14623 and SEQ ID NO:12567. In embodiments, the probe includes SEQ ID NO:14624 and SEQ ID NO:12568. In embodiments, the probe includes SEQ ID NO:14625 and SEQ ID NO:12569. In embodiments, the probe includes SEQ ID NO:14626 and SEQ ID NO:12570. In embodiments, the probe includes SEQ ID NO:14627 and SEQ ID NO:12571. In embodiments, the probe includes SEQ ID NO:14628 and SEQ ID NO:12572. In embodiments, the probe includes SEQ ID NO:14629 and SEQ ID NO:12573. In embodiments, the probe includes SEQ ID NO:14630 and SEQ ID NO:12574. In embodiments, the probe includes SEQ ID NO:14631 and SEQ ID NO:12575. In embodiments, the probe includes SEQ ID NO:14632 and SEQ ID NO:12576. In embodiments, the probe includes SEQ ID NO:14633 and SEQ ID NO:12577. In embodiments, the probe includes SEQ ID NO:14634 and SEQ ID NO:12578. In embodiments, the probe includes SEQ ID NO:14635 and SEQ ID NO:12579. In embodiments, the probe includes SEQ ID NO:14636 and SEQ ID NO:12580. In embodiments, the probe includes SEQ ID NO:14637 and SEQ ID NO:12581. In embodiments, the probe includes SEQ ID NO:14638 and SEQ ID NO:12582. In embodiments, the probe includes SEQ ID NO:14639 and SEQ ID NO:12583. In embodiments, the probe includes SEQ ID NO:14640 and SEQ ID NO:12584. In embodiments, the probe includes SEQ ID NO:14641 and SEQ ID NO:12585. In embodiments, the probe includes SEQ ID NO:14642 and SEQ ID NO:12586. In embodiments, the probe includes SEQ ID NO:14643 and SEQ ID NO:12587. In embodiments, the probe includes SEQ ID NO:14644 and SEQ ID NO:12588. In embodiments, the probe includes SEQ ID NO:14645 and SEQ ID NO:12589. In embodiments, the probe includes SEQ ID NO:14646 and SEQ ID NO:12590. In embodiments, the probe includes SEQ ID NO:14647 and SEQ ID NO:12591. In embodiments, the probe includes SEQ ID NO:14648 and SEQ ID NO:12592. In embodiments, the probe includes SEQ ID NO:14649 and SEQ ID NO:12593. In embodiments, the probe includes SEQ ID NO:14650 and SEQ ID NO:12594. In embodiments, the probe includes SEQ ID NO:14651 and SEQ ID NO:12595. In embodiments, the probe includes SEQ ID NO:14652 and SEQ ID NO:12596. In embodiments, the probe includes SEQ ID NO:14653 and SEQ ID NO:12597. In embodiments, the probe includes SEQ ID NO:14654 and SEQ ID NO:12598. In embodiments, the probe includes SEQ ID NO:14655 and SEQ ID NO:12599. In embodiments, the probe includes SEQ ID NO:14656 and SEQ ID NO:12600. In embodiments, the probe includes SEQ ID NO:14657 and SEQ ID NO:12601. In embodiments, the probe includes SEQ ID NO:14658 and SEQ ID NO:12602. In embodiments, the probe includes SEQ ID NO:14659 and SEQ ID NO:12603. In embodiments, the probe includes SEQ ID NO:14660 and SEQ ID NO:12604. In embodiments, the probe includes SEQ ID NO:14661 and SEQ ID NO:12605. In embodiments, the probe includes SEQ ID NO:14662 and SEQ ID NO:12606. In embodiments, the probe includes SEQ ID NO:14663 and SEQ ID NO:12607. In embodiments, the probe includes SEQ ID NO:14664 and SEQ ID NO:12608. In embodiments, the probe includes SEQ ID NO:14665 and SEQ ID NO:12609. In embodiments, the probe includes SEQ ID NO:14666 and SEQ ID NO:12610. In embodiments, the probe includes SEQ ID NO:14667 and SEQ ID NO:12611. In embodiments, the probe includes SEQ ID NO:14668 and SEQ ID NO:12612. In embodiments, the probe includes SEQ ID NO:14669 and SEQ ID NO:12613. In embodiments, the probe includes SEQ ID NO:14670 and SEQ ID NO:12614. In embodiments, the probe includes SEQ ID NO:14671 and SEQ ID NO:12615. In embodiments, the probe includes SEQ ID NO:14672 and SEQ ID NO:12616. In embodiments, the probe includes SEQ ID NO:14673 and SEQ ID NO:12617. In embodiments, the probe includes SEQ ID NO:14674 and SEQ ID NO:12618. In embodiments, the probe includes SEQ ID NO:14675 and SEQ ID NO:12619. In embodiments, the probe includes SEQ ID NO:14676 and SEQ ID NO:12620. In embodiments, the probe includes SEQ ID NO:14677 and SEQ ID NO:12621. In embodiments, the probe includes SEQ ID NO:14678 and SEQ ID NO:12622. In embodiments, the probe includes SEQ ID NO:14679 and SEQ ID NO:12623. In embodiments, the probe includes SEQ ID NO:14680 and SEQ ID NO:12624. In embodiments, the probe includes SEQ ID NO:14681 and SEQ ID NO:12625. In embodiments, the probe includes SEQ ID NO:14682 and SEQ ID NO:12626. In embodiments, the probe includes SEQ ID NO:14683 and SEQ ID NO:12627. In embodiments, the probe includes SEQ ID NO:14684 and SEQ ID NO:12628. In embodiments, the probe includes SEQ ID NO:14685 and SEQ ID NO:12629. In embodiments, the probe includes SEQ ID NO:14686 and SEQ ID NO:12630. In embodiments, the probe includes SEQ ID NO:14687 and SEQ ID NO:12631. In embodiments, the probe includes SEQ ID NO:14688 and SEQ ID NO:12632. In embodiments, the probe includes SEQ ID NO:14689 and SEQ ID NO:12633. In embodiments, the probe includes SEQ ID NO:14690 and SEQ ID NO:12634. In embodiments, the probe includes SEQ ID NO:14691 and SEQ ID NO:12635. In embodiments, the probe includes SEQ ID NO:14692 and SEQ ID NO:12636. In embodiments, the probe includes SEQ ID NO:14693 and SEQ ID NO:12637. In embodiments, the probe includes SEQ ID NO:14694 and SEQ ID NO:12638. In embodiments, the probe includes SEQ ID NO:14695 and SEQ ID NO:12639. In embodiments, the probe includes SEQ ID NO:14696 and SEQ ID NO:12640. In embodiments, the probe includes SEQ ID NO:14697 and SEQ ID NO:12641. In embodiments, the probe includes SEQ ID NO:14698 and SEQ ID NO:12642. In embodiments, the probe includes SEQ ID NO:14699 and SEQ ID NO:12643. In embodiments, the probe includes SEQ ID NO:14700 and SEQ ID NO:12644. In embodiments, the probe includes SEQ ID NO:14701 and SEQ ID NO:12645. In embodiments, the probe includes SEQ ID NO:14702 and SEQ ID NO:12646. In embodiments, the probe includes SEQ ID NO:14703 and SEQ ID NO:12647. In embodiments, the probe includes SEQ ID NO:14704 and SEQ ID NO:12648. In embodiments, the probe includes SEQ ID NO:14705 and SEQ ID NO:12649. In embodiments, the probe includes SEQ ID NO:14706 and SEQ ID NO:12650. In embodiments, the probe includes SEQ ID NO:14707 and SEQ ID NO:12651. In embodiments, the probe includes SEQ ID NO:14708 and SEQ ID NO:12652. In embodiments, the probe includes SEQ ID NO:14709 and SEQ ID NO:12653. In embodiments, the probe includes SEQ ID NO:14710 and SEQ ID NO:12654. In embodiments, the probe includes SEQ ID NO:14711 and SEQ ID NO:12655. In embodiments, the probe includes SEQ ID NO:14712 and SEQ ID NO:12656. In embodiments, the probe includes SEQ ID NO:14713 and SEQ ID NO:12657. In embodiments, the probe includes SEQ ID NO:14714 and SEQ ID NO:12658. In embodiments, the probe includes SEQ ID NO:14715 and SEQ ID NO:12659. In embodiments, the probe includes SEQ ID NO:14716 and SEQ ID NO:12660. In embodiments, the probe includes SEQ ID NO:14717 and SEQ ID NO:12661. In embodiments, the probe includes SEQ ID NO:14718 and SEQ ID NO:12662. In embodiments, the probe includes SEQ ID NO:14719 and SEQ ID NO:12663. In embodiments, the probe includes SEQ ID NO:14720 and SEQ ID NO:12664. In embodiments, the probe includes SEQ ID NO:14721 and SEQ ID NO:12665. In embodiments, the probe includes SEQ ID NO:14722 and SEQ ID NO:12666. In embodiments, the probe includes SEQ ID NO:14723 and SEQ ID NO:12667. In embodiments, the probe includes SEQ ID NO:14724 and SEQ ID NO:12668. In embodiments, the probe includes SEQ ID NO:14725 and SEQ ID NO:12669. In embodiments, the probe includes SEQ ID NO:14726 and SEQ ID NO:12670. In embodiments, the probe includes SEQ ID NO:14727 and SEQ ID NO:12671. In embodiments, the probe includes SEQ ID NO:14728 and SEQ ID NO:12672. In embodiments, the probe includes SEQ ID NO:14729 and SEQ ID NO:12673. In embodiments, the probe includes SEQ ID NO:14730 and SEQ ID NO:12674. In embodiments, the probe includes SEQ ID NO:14731 and SEQ ID NO:12675. In embodiments, the probe includes SEQ ID NO:14732 and SEQ ID NO:12676. In embodiments, the probe includes SEQ ID NO:14733 and SEQ ID NO:12677. In embodiments, the probe includes SEQ ID NO:14734 and SEQ ID NO:12678. In embodiments, the probe includes SEQ ID NO:14735 and SEQ ID NO:12679. In embodiments, the probe includes SEQ ID NO:14736 and SEQ ID NO:12680. In embodiments, the probe includes SEQ ID NO:14737 and SEQ ID NO:12681. In embodiments, the probe includes SEQ ID NO:14738 and SEQ ID NO:12682. In embodiments, the probe includes SEQ ID NO:14739 and SEQ ID NO:12683. In embodiments, the probe includes SEQ ID NO:14740 and SEQ ID NO:12684. In embodiments, the probe includes SEQ ID NO:14741 and SEQ ID NO:12685. In embodiments, the probe includes SEQ ID NO:14742 and SEQ ID NO:12686. In embodiments, the probe includes SEQ ID NO:14743 and SEQ ID NO:12687. In embodiments, the probe includes SEQ ID NO:14744 and SEQ ID NO:12688. In embodiments, the probe includes SEQ ID NO:14745 and SEQ ID NO:12689. In embodiments, the probe includes SEQ ID NO:14746 and SEQ ID NO:12690. In embodiments, the probe includes SEQ ID NO:14747 and SEQ ID NO:12691. In embodiments, the probe includes SEQ ID NO:14748 and SEQ ID NO:12692. In embodiments, the probe includes SEQ ID NO:14749 and SEQ ID NO:12693. In embodiments, the probe includes SEQ ID NO:14750 and SEQ ID NO:12694. In embodiments, the probe includes SEQ ID NO:14751 and SEQ ID NO:12695. In embodiments, the probe includes SEQ ID NO:14752 and SEQ ID NO:12696. In embodiments, the probe includes SEQ ID NO:14753 and SEQ ID NO:12697. In embodiments, the probe includes SEQ ID NO:14754 and SEQ ID NO:12698. In embodiments, the probe includes SEQ ID NO:14755 and SEQ ID NO:12699. In embodiments, the probe includes SEQ ID NO:14756 and SEQ ID NO:12700. In embodiments, the probe includes SEQ ID NO:14757 and SEQ ID NO:12701. In embodiments, the probe includes SEQ ID NO:14758 and SEQ ID NO:12702. In embodiments, the probe includes SEQ ID NO:14759 and SEQ ID NO:12703. In embodiments, the probe includes SEQ ID NO:14760 and SEQ ID NO:12704. In embodiments, the probe includes SEQ ID NO:14761 and SEQ ID NO:12705. In embodiments, the probe includes SEQ ID NO:14762 and SEQ ID NO:12706. In embodiments, the probe includes SEQ ID NO:14763 and SEQ ID NO:12707. In embodiments, the probe includes SEQ ID NO:14764 and SEQ ID NO:12708. In embodiments, the probe includes SEQ ID NO:14765 and SEQ ID NO:12709. In embodiments, the probe includes SEQ ID NO:14766 and SEQ ID NO:12710. In embodiments, the probe includes SEQ ID NO:14767 and SEQ ID NO:12711. In embodiments, the probe includes SEQ ID NO:14768 and SEQ ID NO:12712. In embodiments, the probe includes SEQ ID NO:14769 and SEQ ID NO:12713. In embodiments, the probe includes SEQ ID NO:14770 and SEQ ID NO:12714. In embodiments, the probe includes SEQ ID NO:14771 and SEQ ID NO:12715. In embodiments, the probe includes SEQ ID NO:14772 and SEQ ID NO:12716. In embodiments, the probe includes SEQ ID NO:14773 and SEQ ID NO:12717. In embodiments, the probe includes SEQ ID NO:14774 and SEQ ID NO:12718. In embodiments, the probe includes SEQ ID NO:14775 and SEQ ID NO:12719. In embodiments, the probe includes SEQ ID NO:14776 and SEQ ID NO:12720. In embodiments, the probe includes SEQ ID NO:14777 and SEQ ID NO:12721. In embodiments, the probe includes SEQ ID NO:14778 and SEQ ID NO:12722. In embodiments, the probe includes SEQ ID NO:14779 and SEQ ID NO:12723. In embodiments, the probe includes SEQ ID NO:14780 and SEQ ID NO:12724. In embodiments, the probe includes SEQ ID NO:14781 and SEQ ID NO:12725. In embodiments, the probe includes SEQ ID NO:14782 and SEQ ID NO:12726. In embodiments, the probe includes SEQ ID NO:14783 and SEQ ID NO:12727. In embodiments, the probe includes SEQ ID NO:14784 and SEQ ID NO:12728. In embodiments, the probe includes SEQ ID NO:14785 and SEQ ID NO:12729. In embodiments, the probe includes SEQ ID NO:14786 and SEQ ID NO:12730. In embodiments, the probe includes SEQ ID NO:14787 and SEQ ID NO:12731. In embodiments, the probe includes SEQ ID NO:14788 and SEQ ID NO:12732. In embodiments, the probe includes SEQ ID NO:14789 and SEQ ID NO:12733. In embodiments, the probe includes SEQ ID NO:14790 and SEQ ID NO:12734. In embodiments, the probe includes SEQ ID NO:14791 and SEQ ID NO:12735. In embodiments, the probe includes SEQ ID NO:14792 and SEQ ID NO:12736. In embodiments, the probe includes SEQ ID NO:14793 and SEQ ID NO:12737. In embodiments, the probe includes SEQ ID NO:14794 and SEQ ID NO:12738. In embodiments, the probe includes SEQ ID NO:14795 and SEQ ID NO:12739. In embodiments, the probe includes SEQ ID NO:14796 and SEQ ID NO:12740. In embodiments, the probe includes SEQ ID NO:14797 and SEQ ID NO:12741. In embodiments, the probe includes SEQ ID NO:14798 and SEQ ID NO:12742. In embodiments, the probe includes SEQ ID NO:14799 and SEQ ID NO:12743. In embodiments, the probe includes SEQ ID NO:14800 and SEQ ID NO:12744. In embodiments, the probe includes SEQ ID NO:14801 and SEQ ID NO:12745. In embodiments, the probe includes SEQ ID NO:14802 and SEQ ID NO:12746. In embodiments, the probe includes SEQ ID NO:14803 and SEQ ID NO:12747. In embodiments, the probe includes SEQ ID NO:14804 and SEQ ID NO:12748. In embodiments, the probe includes SEQ ID NO:14805 and SEQ ID NO:12749. In embodiments, the probe includes SEQ ID NO:14806 and SEQ ID NO:12750. In embodiments, the probe includes SEQ ID NO:14807 and SEQ ID NO:12751. In embodiments, the probe includes SEQ ID NO:14808 and SEQ ID NO:12752. In embodiments, the probe includes SEQ ID NO:14809 and SEQ ID NO:12753. In embodiments, the probe includes SEQ ID NO:14810 and SEQ ID NO:12754. In embodiments, the probe includes SEQ ID NO:14811 and SEQ ID NO:12755. In embodiments, the probe includes SEQ ID NO:14812 and SEQ ID NO:12756. In embodiments, the probe includes SEQ ID NO:14813 and SEQ ID NO:12757. In embodiments, the probe includes SEQ ID NO:14814 and SEQ ID NO:12758. In embodiments, the probe includes SEQ ID NO:14815 and SEQ ID NO:12759. In embodiments, the probe includes SEQ ID NO:14816 and SEQ ID NO:12760. In embodiments, the probe includes SEQ ID NO:14817 and SEQ ID NO:12761. In embodiments, the probe includes SEQ ID NO:14818 and SEQ ID NO:12762. In embodiments, the probe includes SEQ ID NO:14819 and SEQ ID NO:12763. In embodiments, the probe includes SEQ ID NO:14820 and SEQ ID NO:12764. In embodiments, the probe includes SEQ ID NO:14821 and SEQ ID NO:12765. In embodiments, the probe includes SEQ ID NO:14822 and SEQ ID NO:12766. In embodiments, the probe includes SEQ ID NO:14823 and SEQ ID NO:12767. In embodiments, the probe includes SEQ ID NO:14824 and SEQ ID NO:12768. In embodiments, the probe includes SEQ ID NO:14825 and SEQ ID NO:12769. In embodiments, the probe includes SEQ ID NO:14826 and SEQ ID NO:12770. In embodiments, the probe includes SEQ ID NO:14827 and SEQ ID NO:12771. In embodiments, the probe includes SEQ ID NO:14828 and SEQ ID NO:12772. In embodiments, the probe includes SEQ ID NO:14829 and SEQ ID NO:12773. In embodiments, the probe includes SEQ ID NO:14830 and SEQ ID NO:12774. In embodiments, the probe includes SEQ ID NO:14831 and SEQ ID NO:12775. In embodiments, the probe includes SEQ ID NO:14832 and SEQ ID NO:12776. In embodiments, the probe includes SEQ ID NO:14833 and SEQ ID NO:12777. In embodiments, the probe includes SEQ ID NO:14834 and SEQ ID NO:12778. In embodiments, the probe includes SEQ ID NO:14835 and SEQ ID NO:12779. In embodiments, the probe includes SEQ ID NO:14836 and SEQ ID NO:12780. In embodiments, the probe includes SEQ ID NO:14837 and SEQ ID NO:12781. In embodiments, the probe includes SEQ ID NO:14838 and SEQ ID NO:12782. In embodiments, the probe includes SEQ ID NO:14839 and SEQ ID NO:12783. In embodiments, the probe includes SEQ ID NO:14840 and SEQ ID NO:12784. In embodiments, the probe includes SEQ ID NO:14841 and SEQ ID NO:12785. In embodiments, the probe includes SEQ ID NO:14842 and SEQ ID NO:12786. In embodiments, the probe includes SEQ ID NO:14843 and SEQ ID NO:12787. In embodiments, the probe includes SEQ ID NO:14844 and SEQ ID NO:12788. In embodiments, the probe includes SEQ ID NO:14845 and SEQ ID NO:12789. In embodiments, the probe includes SEQ ID NO:14846 and SEQ ID NO:12790. In embodiments, the probe includes SEQ ID NO:14847 and SEQ ID NO:12791. In embodiments, the probe includes SEQ ID NO:14848 and SEQ ID NO:12792. In embodiments, the probe includes SEQ ID NO:14849 and SEQ ID NO:12793. In embodiments, the probe includes SEQ ID NO:14850 and SEQ ID NO:12794. In embodiments, the probe includes SEQ ID NO:14851 and SEQ ID NO:12795. In embodiments, the probe includes SEQ ID NO:14852 and SEQ ID NO:12796. In embodiments, the probe includes SEQ ID NO:14853 and SEQ ID NO:12797. In embodiments, the probe includes SEQ ID NO:14854 and SEQ ID NO:12798. In embodiments, the probe includes SEQ ID NO:14855 and SEQ ID NO:12799. In embodiments, the probe includes SEQ ID NO:14856 and SEQ ID NO:12800. In embodiments, the probe includes SEQ ID NO:14857 and SEQ ID NO:12801. In embodiments, the probe includes SEQ ID NO:14858 and SEQ ID NO:12802. In embodiments, the probe includes SEQ ID NO:14859 and SEQ ID NO:12803. In embodiments, the probe includes SEQ ID NO:14860 and SEQ ID NO:12804. In embodiments, the probe includes SEQ ID NO:14861 and SEQ ID NO:12805. In embodiments, the probe includes SEQ ID NO:14862 and SEQ ID NO:12806. In embodiments, the probe includes SEQ ID NO:14863 and SEQ ID NO:12807. In embodiments, the probe includes SEQ ID NO:14864 and SEQ ID NO:12808. In embodiments, the probe includes SEQ ID NO:14865 and SEQ ID NO:12809. In embodiments, the probe includes SEQ ID NO:14866 and SEQ ID NO:12810. In embodiments, the probe includes SEQ ID NO:14867 and SEQ ID NO:12811. In embodiments, the probe includes SEQ ID NO:14868 and SEQ ID NO:12812. In embodiments, the probe includes SEQ ID NO:14869 and SEQ ID NO:12813. In embodiments, the probe includes SEQ ID NO:14870 and SEQ ID NO:12814. In embodiments, the probe includes SEQ ID NO:14871 and SEQ ID NO:12815. In embodiments, the probe includes SEQ ID NO:14872 and SEQ ID NO:12816. In embodiments, the probe includes SEQ ID NO:14873 and SEQ ID NO:12817. In embodiments, the probe includes SEQ ID NO:14874 and SEQ ID NO:12818. In embodiments, the probe includes SEQ ID NO:14875 and SEQ ID NO:12819. In embodiments, the probe includes SEQ ID NO:14876 and SEQ ID NO:12820. In embodiments, the probe includes SEQ ID NO:14877 and SEQ ID NO:12821. In embodiments, the probe includes SEQ ID NO:14878 and SEQ ID NO:12822. In embodiments, the probe includes SEQ ID NO:14879 and SEQ ID NO:12823. In embodiments, the probe includes SEQ ID NO:14880 and SEQ ID NO:12824. In embodiments, the probe includes SEQ ID NO:14881 and SEQ ID NO:12825. In embodiments, the probe includes SEQ ID NO:14882 and SEQ ID NO:12826. In embodiments, the probe includes SEQ ID NO:14883 and SEQ ID NO:12827. In embodiments, the probe includes SEQ ID NO:14884 and SEQ ID NO:12828. In embodiments, the probe includes SEQ ID NO:14885 and SEQ ID NO:12829. In embodiments, the probe includes SEQ ID NO:14886 and SEQ ID NO:12830. In embodiments, the probe includes SEQ ID NO:14887 and SEQ ID NO:12831. In embodiments, the probe includes SEQ ID NO:14888 and SEQ ID NO:12832. In embodiments, the probe includes SEQ ID NO:14889 and SEQ ID NO:12833. In embodiments, the probe includes SEQ ID NO:14890 and SEQ ID NO:12834. In embodiments, the probe includes SEQ ID NO:14891 and SEQ ID NO:12835. In embodiments, the probe includes SEQ ID NO:14892 and SEQ ID NO:12836. In embodiments, the probe includes SEQ ID NO:14893 and SEQ ID NO:12837. In embodiments, the probe includes SEQ ID NO:14894 and SEQ ID NO:12838. In embodiments, the probe includes SEQ ID NO:14895 and SEQ ID NO:12839. In embodiments, the probe includes SEQ ID NO:14896 and SEQ ID NO:12840. In embodiments, the probe includes SEQ ID NO:14897 and SEQ ID NO:12841. In embodiments, the probe includes SEQ ID NO:14898 and SEQ ID NO:12842. In embodiments, the probe includes SEQ ID NO:14899 and SEQ ID NO:12843. In embodiments, the probe includes SEQ ID NO:14900 and SEQ ID NO:12844. In embodiments, the probe includes SEQ ID NO:14901 and SEQ ID NO:12845. In embodiments, the probe includes SEQ ID NO:14902 and SEQ ID NO:12846. In embodiments, the probe includes SEQ ID NO:14903 and SEQ ID NO:12847. In embodiments, the probe includes SEQ ID NO:14904 and SEQ ID NO:12848. In embodiments, the probe includes SEQ ID NO:14905 and SEQ ID NO:12849. In embodiments, the probe includes SEQ ID NO:14906 and SEQ ID NO:12850. In embodiments, the probe includes SEQ ID NO:14907 and SEQ ID NO:12851. In embodiments, the probe includes SEQ ID NO:14908 and SEQ ID NO:12852. In embodiments, the probe includes SEQ ID NO:14909 and SEQ ID NO:12853. In embodiments, the probe includes SEQ ID NO:14910 and SEQ ID NO:12854. In embodiments, the probe includes SEQ ID NO:14911 and SEQ ID NO:12855. In embodiments, the probe includes SEQ ID NO:14912 and SEQ ID NO:12856. In embodiments, the probe includes SEQ ID NO:14913 and SEQ ID NO:12857. In embodiments, the probe includes SEQ ID NO:14914 and SEQ ID NO:12858. In embodiments, the probe includes SEQ ID NO:14915 and SEQ ID NO:12859. In embodiments, the probe includes SEQ ID NO:14916 and SEQ ID NO:12860. In embodiments, the probe includes SEQ ID NO:14917 and SEQ ID NO:12861. In embodiments, the probe includes SEQ ID NO:14918 and SEQ ID NO:12862. In embodiments, the probe includes SEQ ID NO:14919 and SEQ ID NO:12863. In embodiments, the probe includes SEQ ID NO:14920 and SEQ ID NO:12864. In embodiments, the probe includes SEQ ID NO:14921 and SEQ ID NO:12865. In embodiments, the probe includes SEQ ID NO:14922 and SEQ ID NO:12866. In embodiments, the probe includes SEQ ID NO:14923 and SEQ ID NO:12867. In embodiments, the probe includes SEQ ID NO:14924 and SEQ ID NO:12868. In embodiments, the probe includes SEQ ID NO:14925 and SEQ ID NO:12869. In embodiments, the probe includes SEQ ID NO:14926 and SEQ ID NO:12870. In embodiments, the probe includes SEQ ID NO:14927 and SEQ ID NO:12871. In embodiments, the probe includes SEQ ID NO:14928 and SEQ ID NO:12872. In embodiments, the probe includes SEQ ID NO:14929 and SEQ ID NO:12873. In embodiments, the probe includes SEQ ID NO:14930 and SEQ ID NO:12874. In embodiments, the probe includes SEQ ID NO:14931 and SEQ ID NO:12875. In embodiments, the probe includes SEQ ID NO:14932 and SEQ ID NO:12876. In embodiments, the probe includes SEQ ID NO:14933 and SEQ ID NO:12877. In embodiments, the probe includes SEQ ID NO:14934 and SEQ ID NO:12878. In embodiments, the probe includes SEQ ID NO:14935 and SEQ ID NO:12879. In embodiments, the probe includes SEQ ID NO:14936 and SEQ ID NO:12880. In embodiments, the probe includes SEQ ID NO:14937 and SEQ ID NO:12881. In embodiments, the probe includes SEQ ID NO:14938 and SEQ ID NO:12882. In embodiments, the probe includes SEQ ID NO:14939 and SEQ ID NO:12883. In embodiments, the probe includes SEQ ID NO:14940 and SEQ ID NO:12884. In embodiments, the probe includes SEQ ID NO:14941 and SEQ ID NO:12885. In embodiments, the probe includes SEQ ID NO:14942 and SEQ ID NO:12886. In embodiments, the probe includes SEQ ID NO:14943 and SEQ ID NO:12887. In embodiments, the probe includes SEQ ID NO:14944 and SEQ ID NO:12888. In embodiments, the probe includes SEQ ID NO:14945 and SEQ ID NO:12889. In embodiments, the probe includes SEQ ID NO:14946 and SEQ ID NO:12890. In embodiments, the probe includes SEQ ID NO:14947 and SEQ ID NO:12891. In embodiments, the probe includes SEQ ID NO:14948 and SEQ ID NO:12892. In embodiments, the probe includes SEQ ID NO:14949 and SEQ ID NO:12893. In embodiments, the probe includes SEQ ID NO:14950 and SEQ ID NO:12894. In embodiments, the probe includes SEQ ID NO:14951 and SEQ ID NO:12895. In embodiments, the probe includes SEQ ID NO:14952 and SEQ ID NO:12896. In embodiments, the probe includes SEQ ID NO:14953 and SEQ ID NO:12897. In embodiments, the probe includes SEQ ID NO:14954 and SEQ ID NO:12898. In embodiments, the probe includes SEQ ID NO:14955 and SEQ ID NO:12899. In embodiments, the probe includes SEQ ID NO:14956 and SEQ ID NO:12900. In embodiments, the probe includes SEQ ID NO:14957 and SEQ ID NO:12901. In embodiments, the probe includes SEQ ID NO:14958 and SEQ ID NO:12902. In embodiments, the probe includes SEQ ID NO:14959 and SEQ ID NO:12903. In embodiments, the probe includes SEQ ID NO:14960 and SEQ ID NO:12904. In embodiments, the probe includes SEQ ID NO:14961 and SEQ ID NO:12905. In embodiments, the probe includes SEQ ID NO:14962 and SEQ ID NO:12906. In embodiments, the probe includes SEQ ID NO:14963 and SEQ ID NO:12907. In embodiments, the probe includes SEQ ID NO:14964 and SEQ ID NO:12908. In embodiments, the probe includes SEQ ID NO:14965 and SEQ ID NO:12909. In embodiments, the probe includes SEQ ID NO:14966 and SEQ ID NO:12910. In embodiments, the probe includes SEQ ID NO:14967 and SEQ ID NO:12911. In embodiments, the probe includes SEQ ID NO:14968 and SEQ ID NO:12912. In embodiments, the probe includes SEQ ID NO:14969 and SEQ ID NO:12913. In embodiments, the probe includes SEQ ID NO:14970 and SEQ ID NO:12914. In embodiments, the probe includes SEQ ID NO:14971 and SEQ ID NO:12915. In embodiments, the probe includes SEQ ID NO:14972 and SEQ ID NO:12916. In embodiments, the probe includes SEQ ID NO:14973 and SEQ ID NO:12917. In embodiments, the probe includes SEQ ID NO:14974 and SEQ ID NO:12918. In embodiments, the probe includes SEQ ID NO:14975 and SEQ ID NO:12919. In embodiments, the probe includes SEQ ID NO:14976 and SEQ ID NO:12920. In embodiments, the probe includes SEQ ID NO:14977 and SEQ ID NO:12921. In embodiments, the probe includes SEQ ID NO:14978 and SEQ ID NO:12922. In embodiments, the probe includes SEQ ID NO:14979 and SEQ ID NO:12923. In embodiments, the probe includes SEQ ID NO:14980 and SEQ ID NO:12924. In embodiments, the probe includes SEQ ID NO:14981 and SEQ ID NO:12925. In embodiments, the probe includes SEQ ID NO:14982 and SEQ ID NO:12926. In embodiments, the probe includes SEQ ID NO:14983 and SEQ ID NO:12927. In embodiments, the probe includes SEQ ID NO:14984 and SEQ ID NO:12928. In embodiments, the probe includes SEQ ID NO:14985 and SEQ ID NO:12929. In embodiments, the probe includes SEQ ID NO:14986 and SEQ ID NO:12930. In embodiments, the probe includes SEQ ID NO:14987 and SEQ ID NO:12931. In embodiments, the probe includes SEQ ID NO:14988 and SEQ ID NO:12932. In embodiments, the probe includes SEQ ID NO:14989 and SEQ ID NO:12933. In embodiments, the probe includes SEQ ID NO:14990 and SEQ ID NO:12934. In embodiments, the probe includes SEQ ID NO:14991 and SEQ ID NO:12935. In embodiments, the probe includes SEQ ID NO:14992 and SEQ ID NO:12936. In embodiments, the probe includes SEQ ID NO:14993 and SEQ ID NO:12937. In embodiments, the probe includes SEQ ID NO:14994 and SEQ ID NO:12938. In embodiments, the probe includes SEQ ID NO:14995 and SEQ ID NO:12939. In embodiments, the probe includes SEQ ID NO:14996 and SEQ ID NO:12940. In embodiments, the probe includes SEQ ID NO:14997 and SEQ ID NO:12941. In embodiments, the probe includes SEQ ID NO:14998 and SEQ ID NO:12942. In embodiments, the probe includes SEQ ID NO:14999 and SEQ ID NO:12943. In embodiments, the probe includes SEQ ID NO:15000 and SEQ ID NO:12944. In embodiments, the probe includes SEQ ID NO:15001 and SEQ ID NO:12945. In embodiments, the probe includes SEQ ID NO:15002 and SEQ ID NO:12946. In embodiments, the probe includes SEQ ID NO:15003 and SEQ ID NO:12947. In embodiments, the probe includes SEQ ID NO:15004 and SEQ ID NO:12948. In embodiments, the probe includes SEQ ID NO:15005 and SEQ ID NO:12949. In embodiments, the probe includes SEQ ID NO:15006 and SEQ ID NO:12950. In embodiments, the probe includes SEQ ID NO:15007 and SEQ ID NO:12951. In embodiments, the probe includes SEQ ID NO:15008 and SEQ ID NO:12952. In embodiments, the probe includes SEQ ID NO:15009 and SEQ ID NO:12953. In embodiments, the probe includes SEQ ID NO:15010 and SEQ ID NO:12954. In embodiments, the probe includes SEQ ID NO:15011 and SEQ ID NO:12955. In embodiments, the probe includes SEQ ID NO:15012 and SEQ ID NO:12956. In embodiments, the probe includes SEQ ID NO:15013 and SEQ ID NO:12957. In embodiments, the probe includes SEQ ID NO:15014 and SEQ ID NO:12958. In embodiments, the probe includes SEQ ID NO:15015 and SEQ ID NO:12959. In embodiments, the probe includes SEQ ID NO:15016 and SEQ ID NO:12960. In embodiments, the probe includes SEQ ID NO:15017 and SEQ ID NO:12961. In embodiments, the probe includes SEQ ID NO:15018 and SEQ ID NO:12962. In embodiments, the probe includes SEQ ID NO:15019 and SEQ ID NO:12963. In embodiments, the probe includes SEQ ID NO:15020 and SEQ ID NO:12964. In embodiments, the probe includes SEQ ID NO:15021 and SEQ ID NO:12965. In embodiments, the probe includes SEQ ID NO:15022 and SEQ ID NO:12966. In embodiments, the probe includes SEQ ID NO:15023 and SEQ ID NO:12967. In embodiments, the probe includes SEQ ID NO:15024 and SEQ ID NO:12968. In embodiments, the probe includes SEQ ID NO:15025 and SEQ ID NO:12969. In embodiments, the probe includes SEQ ID NO:15026 and SEQ ID NO:12970. In embodiments, the probe includes SEQ ID NO:15027 and SEQ ID NO:12971. In embodiments, the probe includes SEQ ID NO:15028 and SEQ ID NO:12972. In embodiments, the probe includes SEQ ID NO:15029 and SEQ ID NO:12973. In embodiments, the probe includes SEQ ID NO:15030 and SEQ ID NO:12974. In embodiments, the probe includes SEQ ID NO:15031 and SEQ ID NO:12975. In embodiments, the probe includes SEQ ID NO:15032 and SEQ ID NO:12976. In embodiments, the probe includes SEQ ID NO:15033 and SEQ ID NO:12977. In embodiments, the probe includes SEQ ID NO:15034 and SEQ ID NO:12978. In embodiments, the probe includes SEQ ID NO:15035 and SEQ ID NO:12979. In embodiments, the probe includes SEQ ID NO:15036 and SEQ ID NO:12980. In embodiments, the probe includes SEQ ID NO:15037 and SEQ ID NO:12981. In embodiments, the probe includes SEQ ID NO:15038 and SEQ ID NO:12982. In embodiments, the probe includes SEQ ID NO:15039 and SEQ ID NO:12983. In embodiments, the probe includes SEQ ID NO:15040 and SEQ ID NO:12984. In embodiments, the probe includes SEQ ID NO:15041 and SEQ ID NO:12985. In embodiments, the probe includes SEQ ID NO:15042 and SEQ ID NO:12986. In embodiments, the probe includes SEQ ID NO:15043 and SEQ ID NO:12987. In embodiments, the probe includes SEQ ID NO:15044 and SEQ ID NO:12988. In embodiments, the probe includes SEQ ID NO:15045 and SEQ ID NO:12989. In embodiments, the probe includes SEQ ID NO:15046 and SEQ ID NO:12990. In embodiments, the probe includes SEQ ID NO:15047 and SEQ ID NO:12991. In embodiments, the probe includes SEQ ID NO:15048 and SEQ ID NO:12992. In embodiments, the probe includes SEQ ID NO:15049 and SEQ ID NO:12993. In embodiments, the probe includes SEQ ID NO:15050 and SEQ ID NO:12994. In embodiments, the probe includes SEQ ID NO:15051 and SEQ ID NO:12995. In embodiments, the probe includes SEQ ID NO:15052 and SEQ ID NO:12996. In embodiments, the probe includes SEQ ID NO:15053 and SEQ ID NO:12997. In embodiments, the probe includes SEQ ID NO:15054 and SEQ ID NO:12998. In embodiments, the probe includes SEQ ID NO:15055 and SEQ ID NO:12999. In embodiments, the probe includes SEQ ID NO:15056 and SEQ ID NO:13000. In embodiments, the probe includes SEQ ID NO:15057 and SEQ ID NO:13001. In embodiments, the probe includes SEQ ID NO:15058 and SEQ ID NO:13002. In embodiments, the probe includes SEQ ID NO:15059 and SEQ ID NO:13003. In embodiments, the probe includes SEQ ID NO:15060 and SEQ ID NO:13004. In embodiments, the probe includes SEQ ID NO:15061 and SEQ ID NO:13005. In embodiments, the probe includes SEQ ID NO:15062 and SEQ ID NO:13006. In embodiments, the probe includes SEQ ID NO:15063 and SEQ ID NO:13007. In embodiments, the probe includes SEQ ID NO:15064 and SEQ ID NO:13008. In embodiments, the probe includes SEQ ID NO:15065 and SEQ ID NO:13009. In embodiments, the probe includes SEQ ID NO:15066 and SEQ ID NO:13010. In embodiments, the probe includes SEQ ID NO:15067 and SEQ ID NO:13011. In embodiments, the probe includes SEQ ID NO:15068 and SEQ ID NO:13012. In embodiments, the probe includes SEQ ID NO:15069 and SEQ ID NO:13013. In embodiments, the probe includes SEQ ID NO:15070 and SEQ ID NO:13014. In embodiments, the probe includes SEQ ID NO:15071 and SEQ ID NO:13015. In embodiments, the probe includes SEQ ID NO:15072 and SEQ ID NO:13016. In embodiments, the probe includes SEQ ID NO:15073 and SEQ ID NO:13017. In embodiments, the probe includes SEQ ID NO:15074 and SEQ ID NO:13018. In embodiments, the probe includes SEQ ID NO:15075 and SEQ ID NO:13019. In embodiments, the probe includes SEQ ID NO:15076 and SEQ ID NO:13020. In embodiments, the probe includes SEQ ID NO:15077 and SEQ ID NO:13021. In embodiments, the probe includes SEQ ID NO:15078 and SEQ ID NO:13022. In embodiments, the probe includes SEQ ID NO:15079 and SEQ ID NO:13023. In embodiments, the probe includes SEQ ID NO:15080 and SEQ ID NO:13024. In embodiments, the probe includes SEQ ID NO:15081 and SEQ ID NO:13025. In embodiments, the probe includes SEQ ID NO:15082 and SEQ ID NO:13026. In embodiments, the probe includes SEQ ID NO:15083 and SEQ ID NO:13027. In embodiments, the probe includes SEQ ID NO:15084 and SEQ ID NO:13028. In embodiments, the probe includes SEQ ID NO:15085 and SEQ ID NO:13029. In embodiments, the probe includes SEQ ID NO:15086 and SEQ ID NO:13030. In embodiments, the probe includes SEQ ID NO:15087 and SEQ ID NO:13031. In embodiments, the probe includes SEQ ID NO:15088 and SEQ ID NO:13032. In embodiments, the probe includes SEQ ID NO:15089 and SEQ ID NO:13033. In embodiments, the probe includes SEQ ID NO:15090 and SEQ ID NO:13034. In embodiments, the probe includes SEQ ID NO:15091 and SEQ ID NO:13035. In embodiments, the probe includes SEQ ID NO:15092 and SEQ ID NO:13036. In embodiments, the probe includes SEQ ID NO:15093 and SEQ ID NO:13037. In embodiments, the probe includes SEQ ID NO:15094 and SEQ ID NO:13038. In embodiments, the probe includes SEQ ID NO:15095 and SEQ ID NO:13039. In embodiments, the probe includes SEQ ID NO:15096 and SEQ ID NO:13040. In embodiments, the probe includes SEQ ID NO:15097 and SEQ ID NO:13041. In embodiments, the probe includes SEQ ID NO:15098 and SEQ ID NO:13042. In embodiments, the probe includes SEQ ID NO:15099 and SEQ ID NO:13043. In embodiments, the probe includes SEQ ID NO:15100 and SEQ ID NO:13044. In embodiments, the probe includes SEQ ID NO:15101 and SEQ ID NO:13045. In embodiments, the probe includes SEQ ID NO:15102 and SEQ ID NO:13046. In embodiments, the probe includes SEQ ID NO:15103 and SEQ ID NO:13047. In embodiments, the probe includes SEQ ID NO:15104 and SEQ ID NO:13048. In embodiments, the probe includes SEQ ID NO:15105 and SEQ ID NO:13049. In embodiments, the probe includes SEQ ID NO:15106 and SEQ ID NO:13050. In embodiments, the probe includes SEQ ID NO:15107 and SEQ ID NO:13051. In embodiments, the probe includes SEQ ID NO:15108 and SEQ ID NO:13052. In embodiments, the probe includes SEQ ID NO:15109 and SEQ ID NO:13053. In embodiments, the probe includes SEQ ID NO:15110 and SEQ ID NO:13054. In embodiments, the probe includes SEQ ID NO:15111 and SEQ ID NO:13055. In embodiments, the probe includes SEQ ID NO:15112 and SEQ ID NO:13056. In embodiments, the probe includes SEQ ID NO:15113 and SEQ ID NO:13057. In embodiments, the probe includes SEQ ID NO:15114 and SEQ ID NO:13058. In embodiments, the probe includes SEQ ID NO:15115 and SEQ ID NO:13059. In embodiments, the probe includes SEQ ID NO:15116 and SEQ ID NO:13060. In embodiments, the probe includes SEQ ID NO:15117 and SEQ ID NO:13061. In embodiments, the probe includes SEQ ID NO:15118 and SEQ ID NO:13062. In embodiments, the probe includes SEQ ID NO:15119 and SEQ ID NO:13063. In embodiments, the probe includes SEQ ID NO:15120 and SEQ ID NO:13064. In embodiments, the probe includes SEQ ID NO:15121 and SEQ ID NO:13065. In embodiments, the probe includes SEQ ID NO:15122 and SEQ ID NO:13066. In embodiments, the probe includes SEQ ID NO:15123 and SEQ ID NO:13067. In embodiments, the probe includes SEQ ID NO:15124 and SEQ ID NO:13068. In embodiments, the probe includes SEQ ID NO:15125 and SEQ ID NO:13069. In embodiments, the probe includes SEQ ID NO:15126 and SEQ ID NO:13070. In embodiments, the probe includes SEQ ID NO:15127 and SEQ ID NO:13071. In embodiments, the probe includes SEQ ID NO:15128 and SEQ ID NO:13072. In embodiments, the probe includes SEQ ID NO:15129 and SEQ ID NO:13073. In embodiments, the probe includes SEQ ID NO:15130 and SEQ ID NO:13074. In embodiments, the probe includes SEQ ID NO:15131 and SEQ ID NO:13075. In embodiments, the probe includes SEQ ID NO:15132 and SEQ ID NO:13076. In embodiments, the probe includes SEQ ID NO:15133 and SEQ ID NO:13077. In embodiments, the probe includes SEQ ID NO:15134 and SEQ ID NO:13078. In embodiments, the probe includes SEQ ID NO:15135 and SEQ ID NO:13079. In embodiments, the probe includes SEQ ID NO:15136 and SEQ ID NO:13080. In embodiments, the probe includes SEQ ID NO:15137 and SEQ ID NO:13081. In embodiments, the probe includes SEQ ID NO:15138 and SEQ ID NO:13082. In embodiments, the probe includes SEQ ID NO:15139 and SEQ ID NO:13083. In embodiments, the probe includes SEQ ID NO:15140 and SEQ ID NO:13084. In embodiments, the probe includes SEQ ID NO:15141 and SEQ ID NO:13085. In embodiments, the probe includes SEQ ID NO:15142 and SEQ ID NO:13086. In embodiments, the probe includes SEQ ID NO:15143 and SEQ ID NO:13087. In embodiments, the probe includes SEQ ID NO:15144 and SEQ ID NO:13088. In embodiments, the probe includes SEQ ID NO:15145 and SEQ ID NO:13089. In embodiments, the probe includes SEQ ID NO:15146 and SEQ ID NO:13090. In embodiments, the probe includes SEQ ID NO:15147 and SEQ ID NO:13091. In embodiments, the probe includes SEQ ID NO:15148 and SEQ ID NO:13092. In embodiments, the probe includes SEQ ID NO:15149 and SEQ ID NO:13093. In embodiments, the probe includes SEQ ID NO:15150 and SEQ ID NO:13094. In embodiments, the probe includes SEQ ID NO:15151 and SEQ ID NO:13095. In embodiments, the probe includes SEQ ID NO:15152 and SEQ ID NO:13096. In embodiments, the probe includes SEQ ID NO:15153 and SEQ ID NO:13097. In embodiments, the probe includes SEQ ID NO:15154 and SEQ ID NO:13098. In embodiments, the probe includes SEQ ID NO:15155 and SEQ ID NO:13099. In embodiments, the probe includes SEQ ID NO:15156 and SEQ ID NO:13100. In embodiments, the probe includes SEQ ID NO:15157 and SEQ ID NO:13101. In embodiments, the probe includes SEQ ID NO:15158 and SEQ ID NO:13102. In embodiments, the probe includes SEQ ID NO:15159 and SEQ ID NO:13103. In embodiments, the probe includes SEQ ID NO:15160 and SEQ ID NO:13104. In embodiments, the probe includes SEQ ID NO:15161 and SEQ ID NO:13105. In embodiments, the probe includes SEQ ID NO:15162 and SEQ ID NO:13106. In embodiments, the probe includes SEQ ID NO:15163 and SEQ ID NO:13107. In embodiments, the probe includes SEQ ID NO:15164 and SEQ ID NO:13108. In embodiments, the probe includes SEQ ID NO:15165 and SEQ ID NO:13109. In embodiments, the probe includes SEQ ID NO:15166 and SEQ ID NO:13110. In embodiments, the probe includes SEQ ID NO:15167 and SEQ ID NO:13111. In embodiments, the probe includes SEQ ID NO:15168 and SEQ ID NO:13112. In embodiments, the probe includes SEQ ID NO:15169 and SEQ ID NO:13113. In embodiments, the probe includes SEQ ID NO:15170 and SEQ ID NO:13114. In embodiments, the probe includes SEQ ID NO:15171 and SEQ ID NO:13115. In embodiments, the probe includes SEQ ID NO:15172 and SEQ ID NO:13116. In embodiments, the probe includes SEQ ID NO:15173 and SEQ ID NO:13117. In embodiments, the probe includes SEQ ID NO:15174 and SEQ ID NO:13118. In embodiments, the probe includes SEQ ID NO:15175 and SEQ ID NO:13119. In embodiments, the probe includes SEQ ID NO:15176 and SEQ ID NO:13120. In embodiments, the probe includes SEQ ID NO:15177 and SEQ ID NO:13121. In embodiments, the probe includes SEQ ID NO:15178 and SEQ ID NO:13122. In embodiments, the probe includes SEQ ID NO:15179 and SEQ ID NO:13123. In embodiments, the probe includes SEQ ID NO:15180 and SEQ ID NO:13124. In embodiments, the probe includes SEQ ID NO:15181 and SEQ ID NO:13125. In embodiments, the probe includes SEQ ID NO:15182 and SEQ ID NO:13126. In embodiments, the probe includes SEQ ID NO:15183 and SEQ ID NO:13127. In embodiments, the probe includes SEQ ID NO:15184 and SEQ ID NO:13128. In embodiments, the probe includes SEQ ID NO:15185 and SEQ ID NO:13129. In embodiments, the probe includes SEQ ID NO:15186 and SEQ ID NO:13130. In embodiments, the probe includes SEQ ID NO:15187 and SEQ ID NO:13131. In embodiments, the probe includes SEQ ID NO:15188 and SEQ ID NO:13132. In embodiments, the probe includes SEQ ID NO:15189 and SEQ ID NO:13133. In embodiments, the probe includes SEQ ID NO:15190 and SEQ ID NO:13134. In embodiments, the probe includes SEQ ID NO:15191 and SEQ ID NO:13135. In embodiments, the probe includes SEQ ID NO:15192 and SEQ ID NO:13136. In embodiments, the probe includes SEQ ID NO:15193 and SEQ ID NO:13137. In embodiments, the probe includes SEQ ID NO:15194 and SEQ ID NO:13138. In embodiments, the probe includes SEQ ID NO:15195 and SEQ ID NO:13139. In embodiments, the probe includes SEQ ID NO:15196 and SEQ ID NO:13140. In embodiments, the probe includes SEQ ID NO:15197 and SEQ ID NO:13141. In embodiments, the probe includes SEQ ID NO:15198 and SEQ ID NO:13142. In embodiments, the probe includes SEQ ID NO:15199 and SEQ ID NO:13143. In embodiments, the probe includes SEQ ID NO:15200 and SEQ ID NO:13144. In embodiments, the probe includes SEQ ID NO:15201 and SEQ ID NO:13145. In embodiments, the probe includes SEQ ID NO:15202 and SEQ ID NO:13146. In embodiments, the probe includes SEQ ID NO:15203 and SEQ ID NO:13147. In embodiments, the probe includes SEQ ID NO:15204 and SEQ ID NO:13148. In embodiments, the probe includes SEQ ID NO:15205 and SEQ ID NO:13149. In embodiments, the probe includes SEQ ID NO:15206 and SEQ ID NO:13150. In embodiments, the probe includes SEQ ID NO:15207 and SEQ ID NO:13151. In embodiments, the probe includes SEQ ID NO:15208 and SEQ ID NO:13152. In embodiments, the probe includes SEQ ID NO:15209 and SEQ ID NO:13153. In embodiments, the probe includes SEQ ID NO:15210 and SEQ ID NO:13154. In embodiments, the probe includes SEQ ID NO:15211 and SEQ ID NO:13155. In embodiments, the probe includes SEQ ID NO:15212 and SEQ ID NO:13156. In embodiments, the probe includes SEQ ID NO:15213 and SEQ ID NO:13157. In embodiments, the probe includes SEQ ID NO:15214 and SEQ ID NO:13158. In embodiments, the probe includes SEQ ID NO:15215 and SEQ ID NO:13159. In embodiments, the probe includes SEQ ID NO:15216 and SEQ ID NO:13160. In embodiments, the probe includes SEQ ID NO:15217 and SEQ ID NO:13161. In embodiments, the probe includes SEQ ID NO:15218 and SEQ ID NO:13162. In embodiments, the probe includes SEQ ID NO:15219 and SEQ ID NO:13163. In embodiments, the probe includes SEQ ID NO:15220 and SEQ ID NO:13164. In embodiments, the probe includes SEQ ID NO:15221 and SEQ ID NO:13165. In embodiments, the probe includes SEQ ID NO:15222 and SEQ ID NO:13166. In embodiments, the probe includes SEQ ID NO:15223 and SEQ ID NO:13167. In embodiments, the probe includes SEQ ID NO:15224 and SEQ ID NO:13168. In embodiments, the probe includes SEQ ID NO:15225 and SEQ ID NO:13169. In embodiments, the probe includes SEQ ID NO:15226 and SEQ ID NO:13170. In embodiments, the probe includes SEQ ID NO:15227 and SEQ ID NO:13171. In embodiments, the probe includes SEQ ID NO:15228 and SEQ ID NO:13172. In embodiments, the probe includes SEQ ID NO:15229 and SEQ ID NO:13173. In embodiments, the probe includes SEQ ID NO:15230 and SEQ ID NO:13174. In embodiments, the probe includes SEQ ID NO:15231 and SEQ ID NO:13175. In embodiments, the probe includes SEQ ID NO:15232 and SEQ ID NO:13176. In embodiments, the probe includes SEQ ID NO:15233 and SEQ ID NO:13177. In embodiments, the probe includes SEQ ID NO:15234 and SEQ ID NO:13178. In embodiments, the probe includes SEQ ID NO:15235 and SEQ ID NO:13179. In embodiments, the probe includes SEQ ID NO:15236 and SEQ ID NO:13180. In embodiments, the probe includes SEQ ID NO:15237 and SEQ ID NO:13181. In embodiments, the probe includes SEQ ID NO:15238 and SEQ ID NO:13182. In embodiments, the probe includes SEQ ID NO:15239 and SEQ ID NO:13183. In embodiments, the probe includes SEQ ID NO:15240 and SEQ ID NO:13184. In embodiments, the probe includes SEQ ID NO:15241 and SEQ ID NO:13185. In embodiments, the probe includes SEQ ID NO:15242 and SEQ ID NO:13186. In embodiments, the probe includes SEQ ID NO:15243 and SEQ ID NO:13187. In embodiments, the probe includes SEQ ID NO:15244 and SEQ ID NO:13188. In embodiments, the probe includes SEQ ID NO:15245 and SEQ ID NO:13189. In embodiments, the probe includes SEQ ID NO:15246 and SEQ ID NO:13190. In embodiments, the probe includes SEQ ID NO:15247 and SEQ ID NO:13191. In embodiments, the probe includes SEQ ID NO:15248 and SEQ ID NO:13192. In embodiments, the probe includes SEQ ID NO:15249 and SEQ ID NO:13193. In embodiments, the probe includes SEQ ID NO:15250 and SEQ ID NO:13194. In embodiments, the probe includes SEQ ID NO:15251 and SEQ ID NO:13195. In embodiments, the probe includes SEQ ID NO:15252 and SEQ ID NO:13196. In embodiments, the probe includes SEQ ID NO:15253 and SEQ ID NO:13197. In embodiments, the probe includes SEQ ID NO:15254 and SEQ ID NO:13198. In embodiments, the probe includes SEQ ID NO:15255 and SEQ ID NO:13199. In embodiments, the probe includes SEQ ID NO:15256 and SEQ ID NO:13200. In embodiments, the probe includes SEQ ID NO:15257 and SEQ ID NO:13201. In embodiments, the probe includes SEQ ID NO:15258 and SEQ ID NO:13202. In embodiments, the probe includes SEQ ID NO:15259 and SEQ ID NO:13203. In embodiments, the probe includes SEQ ID NO:15260 and SEQ ID NO:13204. In embodiments, the probe includes SEQ ID NO:15261 and SEQ ID NO:13205. In embodiments, the probe includes SEQ ID NO:15262 and SEQ ID NO:13206. In embodiments, the probe includes SEQ ID NO:15263 and SEQ ID NO:13207. In embodiments, the probe includes SEQ ID NO:15264 and SEQ ID NO:13208. In embodiments, the probe includes SEQ ID NO:15265 and SEQ ID NO:13209. In embodiments, the probe includes SEQ ID NO:15266 and SEQ ID NO:13210. In embodiments, the probe includes SEQ ID NO:15267 and SEQ ID NO:13211. In embodiments, the probe includes SEQ ID NO:15268 and SEQ ID NO:13212. In embodiments, the probe includes SEQ ID NO:15269 and SEQ ID NO:13213. In embodiments, the probe includes SEQ ID NO:15270 and SEQ ID NO:13214. In embodiments, the probe includes SEQ ID NO:15271 and SEQ ID NO:13215. In embodiments, the probe includes SEQ ID NO:15272 and SEQ ID NO:13216. In embodiments, the probe includes SEQ ID NO:15273 and SEQ ID NO:13217. In embodiments, the probe includes SEQ ID NO:15274 and SEQ ID NO:13218. In embodiments, the probe includes SEQ ID NO:15275 and SEQ ID NO:13219. In embodiments, the probe includes SEQ ID NO:15276 and SEQ ID NO:13220. In embodiments, the probe includes SEQ ID NO:15277 and SEQ ID NO:13221. In embodiments, the probe includes SEQ ID NO:15278 and SEQ ID NO:13222. In embodiments, the probe includes SEQ ID NO:15279 and SEQ ID NO:13223. In embodiments, the probe includes SEQ ID NO:15280 and SEQ ID NO:13224. In embodiments, the probe includes SEQ ID NO:15281 and SEQ ID NO:13225. In embodiments, the probe includes SEQ ID NO:15282 and SEQ ID NO:13226. In embodiments, the probe includes SEQ ID NO:15283 and SEQ ID NO:13227. In embodiments, the probe includes SEQ ID NO:15284 and SEQ ID NO:13228. In embodiments, the probe includes SEQ ID NO:15285 and SEQ ID NO:13229. In embodiments, the probe includes SEQ ID NO:15286 and SEQ ID NO:13230. In embodiments, the probe includes SEQ ID NO:15287 and SEQ ID NO:13231. In embodiments, the probe includes SEQ ID NO:15288 and SEQ ID NO:13232. In embodiments, the probe includes SEQ ID NO:15289 and SEQ ID NO:13233. In embodiments, the probe includes SEQ ID NO:15290 and SEQ ID NO:13234. In embodiments, the probe includes SEQ ID NO:15291 and SEQ ID NO:13235. In embodiments, the probe includes SEQ ID NO:15292 and SEQ ID NO:13236. In embodiments, the probe includes SEQ ID NO:15293 and SEQ ID NO:13237. In embodiments, the probe includes SEQ ID NO:15294 and SEQ ID NO:13238. In embodiments, the probe includes SEQ ID NO:15295 and SEQ ID NO:13239. In embodiments, the probe includes SEQ ID NO:15296 and SEQ ID NO:13240. In embodiments, the probe includes SEQ ID NO:15297 and SEQ ID NO:13241. In embodiments, the probe includes SEQ ID NO:15298 and SEQ ID NO:13242. In embodiments, the probe includes SEQ ID NO:15299 and SEQ ID NO:13243. In embodiments, the probe includes SEQ ID NO:15300 and SEQ ID NO:13244. In embodiments, the probe includes SEQ ID NO:15301 and SEQ ID NO:13245. In embodiments, the probe includes SEQ ID NO:15302 and SEQ ID NO:13246. In embodiments, the probe includes SEQ ID NO:15303 and SEQ ID NO:13247. In embodiments, the probe includes SEQ ID NO:15304 and SEQ ID NO:13248. In embodiments, the probe includes SEQ ID NO:15305 and SEQ ID NO:13249. In embodiments, the probe includes SEQ ID NO:15306 and SEQ ID NO:13250. In embodiments, the probe includes SEQ ID NO:15307 and SEQ ID NO:13251. In embodiments, the probe includes SEQ ID NO:15308 and SEQ ID NO:13252. In embodiments, the probe includes SEQ ID NO:15309 and SEQ ID NO:13253. In embodiments, the probe includes SEQ ID NO:15310 and SEQ ID NO:13254. In embodiments, the probe includes SEQ ID NO:15311 and SEQ ID NO:13255. In embodiments, the probe includes SEQ ID NO:15312 and SEQ ID NO:13256. In embodiments, the probe includes SEQ ID NO:15313 and SEQ ID NO:13257. In embodiments, the probe includes SEQ ID NO:15314 and SEQ ID NO:13258. In embodiments, the probe includes SEQ ID NO:15315 and SEQ ID NO:13259. In embodiments, the probe includes SEQ ID NO:15316 and SEQ ID NO:13260. In embodiments, the probe includes SEQ ID NO:15317 and SEQ ID NO:13261. In embodiments, the probe includes SEQ ID NO:15318 and SEQ ID NO:13262. In embodiments, the probe includes SEQ ID NO:15319 and SEQ ID NO:13263. In embodiments, the probe includes SEQ ID NO:15320 and SEQ ID NO:13264. In embodiments, the probe includes SEQ ID NO:15321 and SEQ ID NO:13265. In embodiments, the probe includes SEQ ID NO:15322 and SEQ ID NO:13266. In embodiments, the probe includes SEQ ID NO:15323 and SEQ ID NO:13267. In embodiments, the probe includes SEQ ID NO:15324 and SEQ ID NO:13268. In embodiments, the probe includes SEQ ID NO:15325 and SEQ ID NO:13269. In embodiments, the probe includes SEQ ID NO:15326 and SEQ ID NO:13270. In embodiments, the probe includes SEQ ID NO:15327 and SEQ ID NO:13271. In embodiments, the probe includes SEQ ID NO:15328 and SEQ ID NO:13272. In embodiments, the probe includes SEQ ID NO:15329 and SEQ ID NO:13273. In embodiments, the probe includes SEQ ID NO:15330 and SEQ ID NO:13274. In embodiments, the probe includes SEQ ID NO:15331 and SEQ ID NO:13275. In embodiments, the probe includes SEQ ID NO:15332 and SEQ ID NO:13276. In embodiments, the probe includes SEQ ID NO:15333 and SEQ ID NO:13277. In embodiments, the probe includes SEQ ID NO:15334 and SEQ ID NO:13278. In embodiments, the probe includes SEQ ID NO:15335 and SEQ ID NO:13279. In embodiments, the probe includes SEQ ID NO:15336 and SEQ ID NO:13280. In embodiments, the probe includes SEQ ID NO:15337 and SEQ ID NO:13281. In embodiments, the probe includes SEQ ID NO:15338 and SEQ ID NO:13282. In embodiments, the probe includes SEQ ID NO:15339 and SEQ ID NO:13283. In embodiments, the probe includes SEQ ID NO:15340 and SEQ ID NO:13284. In embodiments, the probe includes SEQ ID NO:15341 and SEQ ID NO:13285. In embodiments, the probe includes SEQ ID NO:15342 and SEQ ID NO:13286. In embodiments, the probe includes SEQ ID NO:15343 and SEQ ID NO:13287. In embodiments, the probe includes SEQ ID NO:15344 and SEQ ID NO:13288. In embodiments, the probe includes SEQ ID NO:15345 and SEQ ID NO:13289. In embodiments, the probe includes SEQ ID NO:15346 and SEQ ID NO:13290. In embodiments, the probe includes SEQ ID NO:15347 and SEQ ID NO:13291. In embodiments, the probe includes SEQ ID NO:15348 and SEQ ID NO:13292. In embodiments, the probe includes SEQ ID NO:15349 and SEQ ID NO:13293. In embodiments, the probe includes SEQ ID NO:15350 and SEQ ID NO:13294. In embodiments, the probe includes SEQ ID NO:15351 and SEQ ID NO:13295. In embodiments, the probe includes SEQ ID NO:15352 and SEQ ID NO:13296. In embodiments, the probe includes SEQ ID NO:15353 and SEQ ID NO:13297. In embodiments, the probe includes SEQ ID NO:15354 and SEQ ID NO:13298. In embodiments, the probe includes SEQ ID NO:15355 and SEQ ID NO:13299. In embodiments, the probe includes SEQ ID NO:15356 and SEQ ID NO:13300. In embodiments, the probe includes SEQ ID NO:15357 and SEQ ID NO:13301. In embodiments, the probe includes SEQ ID NO:15358 and SEQ ID NO:13302. In embodiments, the probe includes SEQ ID NO:15359 and SEQ ID NO:13303. In embodiments, the probe includes SEQ ID NO:15360 and SEQ ID NO:13304. In embodiments, the probe includes SEQ ID NO:15361 and SEQ ID NO:13305. In embodiments, the probe includes SEQ ID NO:15362 and SEQ ID NO:13306. In embodiments, the probe includes SEQ ID NO:15363 and SEQ ID NO:13307. In embodiments, the probe includes SEQ ID NO:15364 and SEQ ID NO:13308. In embodiments, the probe includes SEQ ID NO:15365 and SEQ ID NO:13309. In embodiments, the probe includes SEQ ID NO:15366 and SEQ ID NO:13310. In embodiments, the probe includes SEQ ID NO:15367 and SEQ ID NO:13311. In embodiments, the probe includes SEQ ID NO:15368 and SEQ ID NO:13312. In embodiments, the probe includes SEQ ID NO:15369 and SEQ ID NO:13313. In embodiments, the probe includes SEQ ID NO:15370 and SEQ ID NO:13314. In embodiments, the probe includes SEQ ID NO:15371 and SEQ ID NO:13315. In embodiments, the probe includes SEQ ID NO:15372 and SEQ ID NO:13316. In embodiments, the probe includes SEQ ID NO:15373 and SEQ ID NO:13317. In embodiments, the probe includes SEQ ID NO:15374 and SEQ ID NO:13318. In embodiments, the probe includes SEQ ID NO:15375 and SEQ ID NO:13319. In embodiments, the probe includes SEQ ID NO:15376 and SEQ ID NO:13320. In embodiments, the probe includes SEQ ID NO:15377 and SEQ ID NO:13321. In embodiments, the probe includes SEQ ID NO:15378 and SEQ ID NO:13322. In embodiments, the probe includes SEQ ID NO:15379 and SEQ ID NO:13323. In embodiments, the probe includes SEQ ID NO:15380 and SEQ ID NO:13324. In embodiments, the probe includes SEQ ID NO:15381 and SEQ ID NO:13325. In embodiments, the probe includes SEQ ID NO:15382 and SEQ ID NO:13326. In embodiments, the probe includes SEQ ID NO:15383 and SEQ ID NO:13327. In embodiments, the probe includes SEQ ID NO:15384 and SEQ ID NO:13328. In embodiments, the probe includes SEQ ID NO:15385 and SEQ ID NO:13329. In embodiments, the probe includes SEQ ID NO:15386 and SEQ ID NO:13330. In embodiments, the probe includes SEQ ID NO:15387 and SEQ ID NO:13331. In embodiments, the probe includes SEQ ID NO:15388 and SEQ ID NO:13332. In embodiments, the probe includes SEQ ID NO:15389 and SEQ ID NO:13333. In embodiments, the probe includes SEQ ID NO:15390 and SEQ ID NO:13334. In embodiments, the probe includes SEQ ID NO:15391 and SEQ ID NO:13335. In embodiments, the probe includes SEQ ID NO:15392 and SEQ ID NO:13336. In embodiments, the probe includes SEQ ID NO:15393 and SEQ ID NO:13337. In embodiments, the probe includes SEQ ID NO:15394 and SEQ ID NO:13338. In embodiments, the probe includes SEQ ID NO:15395 and SEQ ID NO:13339. In embodiments, the probe includes SEQ ID NO:15396 and SEQ ID NO:13340. In embodiments, the probe includes SEQ ID NO:15397 and SEQ ID NO:13341. In embodiments, the probe includes SEQ ID NO:15398 and SEQ ID NO:13342. In embodiments, the probe includes SEQ ID NO:15399 and SEQ ID NO:13343. In embodiments, the probe includes SEQ ID NO:15400 and SEQ ID NO:13344. In embodiments, the probe includes SEQ ID NO:15401 and SEQ ID NO:13345. In embodiments, the probe includes SEQ ID NO:15402 and SEQ ID NO:13346. In embodiments, the probe includes SEQ ID NO:15403 and SEQ ID NO:13347. In embodiments, the probe includes SEQ ID NO:15404 and SEQ ID NO:13348. In embodiments, the probe includes SEQ ID NO:15405 and SEQ ID NO:13349. In embodiments, the probe includes SEQ ID NO:15406 and SEQ ID NO:13350. In embodiments, the probe includes SEQ ID NO:15407 and SEQ ID NO:13351. In embodiments, the probe includes SEQ ID NO:15408 and SEQ ID NO:13352. In embodiments, the probe includes SEQ ID NO:15409 and SEQ ID NO:13353. In embodiments, the probe includes SEQ ID NO:15410 and SEQ ID NO:13354. In embodiments, the probe includes SEQ ID NO:15411 and SEQ ID NO:13355. In embodiments, the probe includes SEQ ID NO:15412 and SEQ ID NO:13356. In embodiments, the probe includes SEQ ID NO:15413 and SEQ ID NO:13357. In embodiments, the probe includes SEQ ID NO:15414 and SEQ ID NO:13358. In embodiments, the probe includes SEQ ID NO:15415 and SEQ ID NO:13359. In embodiments, the probe includes SEQ ID NO:15416 and SEQ ID NO:13360. In embodiments, the probe includes SEQ ID NO:15417 and SEQ ID NO:13361. In embodiments, the probe includes SEQ ID NO:15418 and SEQ ID NO:13362. In embodiments, the probe includes SEQ ID NO:15419 and SEQ ID NO:13363. In embodiments, the probe includes SEQ ID NO:15420 and SEQ ID NO:13364. In embodiments, the probe includes SEQ ID NO:15421 and SEQ ID NO:13365. In embodiments, the probe includes SEQ ID NO:15422 and SEQ ID NO:13366. In embodiments, the probe includes SEQ ID NO:15423 and SEQ ID NO:13367. In embodiments, the probe includes SEQ ID NO:15424 and SEQ ID NO:13368. In embodiments, the probe includes SEQ ID NO:15425 and SEQ ID NO:13369. In embodiments, the probe includes SEQ ID NO:15426 and SEQ ID NO:13370. In embodiments, the probe includes SEQ ID NO:15427 and SEQ ID NO:13371. In embodiments, the probe includes SEQ ID NO:15428 and SEQ ID NO:13372. In embodiments, the probe includes SEQ ID NO:15429 and SEQ ID NO:13373. In embodiments, the probe includes SEQ ID NO:15430 and SEQ ID NO:13374. In embodiments, the probe includes SEQ ID NO:15431 and SEQ ID NO:13375. In embodiments, the probe includes SEQ ID NO:15432 and SEQ ID NO:13376. In embodiments, the probe includes SEQ ID NO:15433 and SEQ ID NO:13377. In embodiments, the probe includes SEQ ID NO:15434 and SEQ ID NO:13378. In embodiments, the probe includes SEQ ID NO:15435 and SEQ ID NO:13379. In embodiments, the probe includes SEQ ID NO:15436 and SEQ ID NO:13380. In embodiments, the probe includes SEQ ID NO:15437 and SEQ ID NO:13381. In embodiments, the probe includes SEQ ID NO:15438 and SEQ ID NO:13382. In embodiments, the probe includes SEQ ID NO:15439 and SEQ ID NO:13383. In embodiments, the probe includes SEQ ID NO:15440 and SEQ ID NO:13384. In embodiments, the probe includes SEQ ID NO:15441 and SEQ ID NO:13385. In embodiments, the probe includes SEQ ID NO:15442 and SEQ ID NO:13386. In embodiments, the probe includes SEQ ID NO:15443 and SEQ ID NO:13387. In embodiments, the probe includes SEQ ID NO:15444 and SEQ ID NO:13388. In embodiments, the probe includes SEQ ID NO:15445 and SEQ ID NO:13389. In embodiments, the probe includes SEQ ID NO:15446 and SEQ ID NO:13390. In embodiments, the probe includes SEQ ID NO:15447 and SEQ ID NO:13391. In embodiments, the probe includes SEQ ID NO:15448 and SEQ ID NO:13392. In embodiments, the probe includes SEQ ID NO:15449 and SEQ ID NO:13393. In embodiments, the probe includes SEQ ID NO:15450 and SEQ ID NO:13394. In embodiments, the probe includes SEQ ID NO:15451 and SEQ ID NO:13395. In embodiments, the probe includes SEQ ID NO:15452 and SEQ ID NO:13396. In embodiments, the probe includes SEQ ID NO:15453 and SEQ ID NO:13397. In embodiments, the probe includes SEQ ID NO:15454 and SEQ ID NO:13398. In embodiments, the probe includes SEQ ID NO:15455 and SEQ ID NO:13399. In embodiments, the probe includes SEQ ID NO:15456 and SEQ ID NO:13400. In embodiments, the probe includes SEQ ID NO:15457 and SEQ ID NO:13401. In embodiments, the probe includes SEQ ID NO:15458 and SEQ ID NO:13402. In embodiments, the probe includes SEQ ID NO:15459 and SEQ ID NO:13403. In embodiments, the probe includes SEQ ID NO:15460 and SEQ ID NO:13404. In embodiments, the probe includes SEQ ID NO:15461 and SEQ ID NO:13405. In embodiments, the probe includes SEQ ID NO:15462 and SEQ ID NO:13406. In embodiments, the probe includes SEQ ID NO:15463 and SEQ ID NO:13407. In embodiments, the probe includes SEQ ID NO:15464 and SEQ ID NO:13408. In embodiments, the probe includes SEQ ID NO:15465 and SEQ ID NO:13409. In embodiments, the probe includes SEQ ID NO:15466 and SEQ ID NO:13410. In embodiments, the probe includes SEQ ID NO:15467 and SEQ ID NO:13411. In embodiments, the probe includes SEQ ID NO:15468 and SEQ ID NO:13412. In embodiments, the probe includes SEQ ID NO:15469 and SEQ ID NO:13413. In embodiments, the probe includes SEQ ID NO:15470 and SEQ ID NO:13414. In embodiments, the probe includes SEQ ID NO:15471 and SEQ ID NO:13415. In embodiments, the probe includes SEQ ID NO:15472 and SEQ ID NO:13416. In embodiments, the probe includes SEQ ID NO:15473 and SEQ ID NO:13417. In embodiments, the probe includes SEQ ID NO:15474 and SEQ ID NO:13418. In embodiments, the probe includes SEQ ID NO:15475 and SEQ ID NO:13419. In embodiments, the probe includes SEQ ID NO:15476 and SEQ ID NO:13420. In embodiments, the probe includes SEQ ID NO:15477 and SEQ ID NO:13421. In embodiments, the probe includes SEQ ID NO:15478 and SEQ ID NO:13422. In embodiments, the probe includes SEQ ID NO:15479 and SEQ ID NO:13423. In embodiments, the probe includes SEQ ID NO:15480 and SEQ ID NO:13424. In embodiments, the probe includes SEQ ID NO:15481 and SEQ ID NO:13425. In embodiments, the probe includes SEQ ID NO:15482 and SEQ ID NO:13426. In embodiments, the probe includes SEQ ID NO:15483 and SEQ ID NO:13427. In embodiments, the probe includes SEQ ID NO:15484 and SEQ ID NO:13428. In embodiments, the probe includes SEQ ID NO:15485 and SEQ ID NO:13429. In embodiments, the probe includes SEQ ID NO:15486 and SEQ ID NO:13430. In embodiments, the probe includes SEQ ID NO:15487 and SEQ ID NO:13431. In embodiments, the probe includes SEQ ID NO:15488 and SEQ ID NO:13432. In embodiments, the probe includes SEQ ID NO:15489 and SEQ ID NO:13433. In embodiments, the probe includes SEQ ID NO:15490 and SEQ ID NO:13434. In embodiments, the probe includes SEQ ID NO:15491 and SEQ ID NO:13435. In embodiments, the probe includes SEQ ID NO:15492 and SEQ ID NO:13436. In embodiments, the probe includes SEQ ID NO:15493 and SEQ ID NO:13437. In embodiments, the probe includes SEQ ID NO:15494 and SEQ ID NO:13438. In embodiments, the probe includes SEQ ID NO:15495 and SEQ ID NO:13439. In embodiments, the probe includes SEQ ID NO:15496 and SEQ ID NO:13440. In embodiments, the probe includes SEQ ID NO:15497 and SEQ ID NO:13441. In embodiments, the probe includes SEQ ID NO:15498 and SEQ ID NO:13442. In embodiments, the probe includes SEQ ID NO:15499 and SEQ ID NO:13443. In embodiments, the probe includes SEQ ID NO:15500 and SEQ ID NO:13444. In embodiments, the probe includes SEQ ID NO:15501 and SEQ ID NO:13445. In embodiments, the probe includes SEQ ID NO:15502 and SEQ ID NO:13446. In embodiments, the probe includes SEQ ID NO:15503 and SEQ ID NO:13447. In embodiments, the probe includes SEQ ID NO:15504 and SEQ ID NO:13448. In embodiments, the probe includes SEQ ID NO:15505 and SEQ ID NO:13449. In embodiments, the probe includes SEQ ID NO:15506 and SEQ ID NO:13450. In embodiments, the probe includes SEQ ID NO:15507 and SEQ ID NO:13451. In embodiments, the probe includes SEQ ID NO:15508 and SEQ ID NO:13452. In embodiments, the probe includes SEQ ID NO:15509 and SEQ ID NO:13453. In embodiments, the probe includes SEQ ID NO:15510 and SEQ ID NO:13454. In embodiments, the probe includes SEQ ID NO:15511 and SEQ ID NO:13455. In embodiments, the probe includes SEQ ID NO:15512 and SEQ ID NO:13456. In embodiments, the probe includes SEQ ID NO:15513 and SEQ ID NO:13457. In embodiments, the probe includes SEQ ID NO:15514 and SEQ ID NO:13458. In embodiments, the probe includes SEQ ID NO:15515 and SEQ ID NO:13459. In embodiments, the probe includes SEQ ID NO:15516 and SEQ ID NO:13460. In embodiments, the probe includes SEQ ID NO:15517 and SEQ ID NO:13461. In embodiments, the probe includes SEQ ID NO:15518 and SEQ ID NO:13462. In embodiments, the probe includes SEQ ID NO:15519 and SEQ ID NO:13463. In embodiments, the probe includes SEQ ID NO:15520 and SEQ ID NO:13464. In embodiments, the probe includes SEQ ID NO:15521 and SEQ ID NO:13465. In embodiments, the probe includes SEQ ID NO:15522 and SEQ ID NO:13466. In embodiments, the probe includes SEQ ID NO:15523 and SEQ ID NO:13467. In embodiments, the probe includes SEQ ID NO:15524 and SEQ ID NO:13468. In embodiments, the probe includes SEQ ID NO:15525 and SEQ ID NO:13469. In embodiments, the probe includes SEQ ID NO:15526 and SEQ ID NO:13470. In embodiments, the probe includes SEQ ID NO:15527 and SEQ ID NO:13471. In embodiments, the probe includes SEQ ID NO:15528 and SEQ ID NO:13472. In embodiments, the probe includes SEQ ID NO:15529 and SEQ ID NO:13473. In embodiments, the probe includes SEQ ID NO:15530 and SEQ ID NO:13474. In embodiments, the probe includes SEQ ID NO:15531 and SEQ ID NO:13475. In embodiments, the probe includes SEQ ID NO:15532 and SEQ ID NO:13476. In embodiments, the probe includes SEQ ID NO:15533 and SEQ ID NO:13477. In embodiments, the probe includes SEQ ID NO:15534 and SEQ ID NO:13478. In embodiments, the probe includes SEQ ID NO:15535 and SEQ ID NO:13479. In embodiments, the probe includes SEQ ID NO:15536 and SEQ ID NO:13480. In embodiments, the probe includes SEQ ID NO:15537 and SEQ ID NO:13481. In embodiments, the probe includes SEQ ID NO:15538 and SEQ ID NO:13482. In embodiments, the probe includes SEQ ID NO:15539 and SEQ ID NO:13483.

[0086] In embodiments, the plurality of probes is ordered into subsets. In embodiments, the probes in a probe subset have a similar melting temperature for binding to their target sites. For example, the Tm may range from about 45° C. to about 65° C., including any Tm within this range such as 45° C., 46° C., 47° C., 48° C., 49° C., 50° C., 51° C., 52° C., 53° C., 54° C., 55° C., 56° C., 57° C., 58° C., 59° C., 60° C., 61° C., 62° C., 63° C., 64° C., or 65° C. In embodiments, the subset of oligonucleotide probes are grouped according to their sequencing primer sequence. For example, a first subset includes the sequencing primer sequence SEQ ID NO:15540 and the subset includes 592 oligonucleotide probes. The second subset includes the sequencing primer sequence SEQ ID NO:15541 and the subset includes 636 oligonucleotide probes. In embodiments, the plurality is divided into 7 subsets and grouped according to a sequencing primer sequence. In embodiments, the first subset includes the sequencing primer sequence SEQ ID NO:15540 and the subset includes 382 oligonucleotide probes. In embodiments, the second subset includes the sequencing primer sequence SEQ ID NO:15541 and the subset includes 373 oligonucleotide probes. In embodiments, the third subset includes the sequencing primer sequence SEQ ID NO:15542 and the subset includes 353 oligonucleotide probes. In embodiments, the fourth subset includes the sequencing primer sequence SEQ ID NO:15543 and the subset includes 334 oligonucleotide probes. In embodiments, the fifth subset includes the sequencing primer sequence SEQ ID NO:15544 and the subset includes 318 oligonucleotide probes. In embodiments, the sixth subset includes the sequencing primer sequence SEQ ID NO:15545 and the subset includes 296 oligonucleotide probes. In embodiments, the probes of the first set are capable of binding between 75 and 150 different gene sequences. In embodiments, the probes are capable of binding between 25 and 75 different gene sequences. In embodiments, the probes are capable of binding between 30 and 100 different gene sequences. In embodiments, the probes are capable of binding between 40 and 120 different gene sequences. In embodiments, the probes are capable of binding between 50 and 150 different gene sequences. In embodiments, the probes are capable of binding between 60 and 180 different gene sequences. In embodiments, the probes are capable of binding between 70 and 200 different gene sequences. In embodiments, the probes are capable of binding between 80 and 220 different gene sequences. In embodiments, the probes are capable of binding between 90 and 250 different gene sequences. In embodiments, the probes are capable of binding between 100 and 300 different gene sequences. In embodiments, the probes are capable of binding between 150 and 400 different gene sequences.

[0087] In embodiments, the first probe set includes a plurality of oligonucleotide probes, wherein a first subset of the plurality of oligonucleotide probes includes a first sequencing primer binding sequence. A second subset includes a plurality of oligonucleotide probes, wherein each of the oligonucleotide probes includes the second sequencing primer binding sequence. A third subset includes a plurality of oligonucleotide probes, wherein each of the oligonucleotide probes includes the third sequencing primer binding sequence. A fourth subset includes a plurality of oligonucleotide probes, wherein each of the oligonucleotide probes includes the fourth sequencing primer binding sequence. A fifth subset includes a plurality of oligonucleotide probes, wherein each of the oligonucleotide probes includes the fifth sequencing primer binding sequence. A sixth subset includes a plurality of oligonucleotide probes, wherein each of the oligonucleotide probes includes the sixth sequencing primer binding sequence. A seventh subset includes a plurality of oligonucleotide probes, wherein each of the oligonucleotide probes includes the seventh sequencing primer binding sequence. An eighth subset includes a plurality of oligonucleotide probes, wherein each of the oligonucleotide probes includes the eighth sequencing primer binding sequence. A ninth subset includes a plurality of oligonucleotide probes, wherein each of the oligonucleotide probes includes the ninth sequencing primer binding sequence. A tenth subset includes a plurality of oligonucleotide probes, wherein each of the oligonucleotide probes includes the tenth sequencing primer binding sequence. An eleventh subset includes a plurality of oligonucleotide probes, wherein each of the oligonucleotide probes includes the eleventh sequencing primer binding sequence. A twelfth subset includes a plurality of oligonucleotide probes, wherein each of the oligonucleotide probes includes the twelfth sequencing primer binding sequence.

[0088] The field of cellular biology has recently been engaged in the intricate task of identifying and quantifying proteins within their native cellular environments. This endeavor, known as in situ protein detection, is pivotal for understanding the complex interplay of biomolecules within cells, thus offering insights into cellular functions, signaling pathways, and the underlying mechanisms of various diseases. Integrating nucleic acid-based methods (e.g., sequencing) with traditional protein detection strategies (e.g., antibody-oligo conjugates) opens new avenues for enhancing sensitivity, specificity, and multiplexing. Antibody-oligo conjugates leverages the specificity of antibodies to target proteins, for example proteins within cells, coupled with the precision and diversity of oligonucleotide sequences for subsequent detection and multiplexing, respectively. Detection includes binding a plurality of different specific binding reagents to a plurality of different targets and subsequently detecting the targets. This enhances the accuracy and reduces the likelihood of false positives in protein detection. Each binding reagent is specific for a particular target, and includes a sequence associated with that specific binding reagent. For example, a first specific binding reagent specific for protein PD-L1 includes an oligonucleotide having the sequence: “AGT.” A second specific binding reagent specific for protein CD15 includes an oligonucleotide having the sequence: “ACG.” When detecting both PD-L1 and CD15 in the same sample, every time the sequence “AGT” is detected, this corresponds to PD-L1 being present. Similarly, when “ACG” is detected, the presence of CD15 is determined. Detection of the oligonucleotide sequences may occur directly. For example, fluorescent probes complementary to the oligonucleotides, may be bound to the Ab-oligo conjugates. Subsequently, the fluorescence emitted by the probes is observed and analyzed under a fluorescence microscope, enabling the detection and localization of specific nucleic acid sequences, typically within the cellular or tissue context. In embodiments, amplification of the oligonucleotide sequence is often pursued to enhance the sensitivity and specificity of molecular probes, such as Fluorescent In Situ Hybridization (FISH) probes. Amplifying an oligonucleotide sequence significantly enhancing the signal-to-noise ratio, markedly increases the intensity of the signal detected from target sequences, making them more discernible against background noise. Amplification of the oligonucleotide sequence is crucial when detecting sequences present in low abundance or alongside other independent readout modalities such as RNA, as it substantially improves the precision and reliability of localization and quantification within native cellular or tissue structure. In embodiments, kits described herein includes antibodies and/or antibody-oligonucleotide (Ab-O) conjugates. In embodiments, the antibodies and/or Ab-O conjugates target CD11c, CD20, CD3e, CD31, CD4, CD45RA, CD56, CD8, HLA-DR, Ki-67, PanCK, PD-1, or PD-L1.

[0089] In embodiments, the target hybridization sequence of each probe (e.g., each probe of a plurality of probes) is complementary to different portions of the same target polynucleotide. In embodiments, the target hybridization sequence of each probe (e.g., each probe of a plurality of probes) is complementary to different portions of different target polynucleotides. In embodiments, the target hybridization sequence of each probe is complementary to portions of the same target polynucleotide that are separated by about 10 to about 500 nucleotides. In embodiments, the target hybridization sequence of each probe are complementary to portions of the same target polynucleotide that are separated by about 10, about 15, about 20, about 25, about 30, about 35, about 40, about 45, about 50, about 75, about 100, about 125, about 150, about 175, about 200, about 225, about 250, about 275, about 300, about 325, about 350, about 375, about 400, about 425, about 450, about 475, or about 500 nucleotides. In embodiments, the target hybridization sequence of each probe is complementary to portions of the same target polynucleotide that are separated by about or more than about 10, 15, 20, 25, 30, 35, 40, 45, 50, 75, 100, 125, 150, 175, 200, 225, 250, 275, 300, 325, 350, 375, 400, 425, 450, 475, or 500 nucleotides. In embodiments, the target hybridization sequence includes one or more modified nucleotide(s). In embodiments, the modified nucleotide includes one or more locked nucleic acids (LNAs), Bis-locked nucleic acids (bisLNAs), twisted intercalating nucleic acids (TINAs), bridged nucleic acids (BNAs), 2′-O-methyl RNA:DNA chimeric nucleic acids, minor groove binder (MGB) nucleic acids, morpholino nucleic acids, C5-modified pyrimidine nucleic acids, peptide nucleic acids (PNAs), phosphorothioate nucleic acids, Zip nucleic acids (ZNAs), or combinations thereof. In embodiments, the first target hybridization sequence includes one or more locked nucleic acids (LNAs), Zip nucleic acids (ZNAs), 2-amino-deoxyadenosine (2-amino-dA), trimethoxystilbene-functionalized oligonucleotides (TFOs), Pyrene-functionalized oligonucleotides (PFOs), peptide nucleic acids (PNAs), or aminoethyl-phenoxazine-dC (AP-dC) nucleic acids. In embodiments, the target hybridization includes from 5′ to 3′ a plurality (e.g., 2 to 5) of phosphorothioate nucleic acids, followed by a plurality of synthetic nucleotides (e.g., LNAs), and subsequently followed by a plurality (e.g., 2 to 5) of canonical nucleobases. In some embodiments, the target hybridization sequence includes a plurality of canonical nucleobases, wherein the canonical nucleobases terminate (i.e., at the 3′ end) with a deoxyuracil nucleobase (dU).

[0090] In embodiments, the target hybridization sequence includes a plurality of LNAs interspersed throughout the polynucleotide. In embodiments, the target hybridization sequence includes a plurality of consecutive LNAs (e.g., 2 to 5 LNAs, 5 to 7 LNAs, or 7 to 10 LNAs) throughout the target hybridization sequence and/or probe sequence. In embodiments, the target hybridization sequence includes a plurality of consecutive LNAs (e.g., 2 to 5 LNAs, 5 to 7 LNAs, or 7 to 10 LNAs) throughout the target hybridization sequence. In embodiments, the target hybridization sequence includes a plurality of consecutive LNAs (e.g., 2 to 5 LNAs, 5 to 7 LNAs, or 7 to 10 LNAs) throughout the probe sequence.

[0091] In embodiments, the oligonucleotide probe binds to a target nucleic acid molecule. In embodiments, the nucleic acid molecule includes a gene sequence. In embodiments, the gene sequence is a ABCG2, ACE2, ACKR1, ACKR4, ACTA2, ACTG2, ADIPOQ, AGR3, AKT1, ALDOB, ANGPT2, ANKRD29, ANKRD30A, AQP1, AQP2, AQP3, AQP5, AR, ARG1, ATP6V0D2, BATF, BCL2, BEST2, BEST4, BTLA, C1QA, C1QB, C1QC, CALB1, CAVIN2, CCK, CCL2, CCL20, CCL3, CCL4, CCL5, CCR2, CCR5, CCR7, CD14, CD163, CD19, CD1C, CD2, CD247, CD27, CD274, CD276, CD28, CD33, CD34, CD36, CD38, CD3D, CD3E, CD4, CD40, CD40LG, CD44, CD47, CD68, CD70, CD74, CD79A, CD80, CD86, CD8A, CEACAM8, CKB, CLDN10, CLEC9A, CLU, COL1A1, CP, CSF1R, CSPG4, CTLA4, CTSL, CTSS, CUBN, CX3CL1, CX3CR1, CXCL10, CXCL11, CXCL12, CXCL13, CXCL9, CXCR3, CXCR4, CXCR5, CXCR6, CYP1A1, DCLK1, DEFA5, DES, DGKG, DMBT1, DMKN, DPT, DST, ECSCR, EGFR, EOMES, ERBB2, ESM1, ESR1, FABP1, FAP, FAS, FASN, FBLN1, FBN1, FCAR, FCGR1A, FCGR3A, FGB, FGFR4, FLNB, FN1, FOXA1, FOXI1, FOXJ1, FOXP3, FSCN1, GATA3, GATM, GIP, GNLY, GPC1, GPR183, GRHL1, GZMA, GZMB, GZMH, GZMK, HAVCR2, HLA-A, HLA-DRA, HOXD8, HSP90AA1, ICA1, ICOSLG, ID2, IDO1, IFNG, IGHA1, IGHD, IGHG1, IGHM, IL10, IL10RA, IL17A, IL1B, IL2RA, IL2RB, IL6, IL7R, INS, IRF1, ITGAM, ITGAX, ITGB2, JCHAIN, KDR, KIT, KLRB1, KLRD1, KLRF1, KLRK1, KRAS, KRT14, KRT23, KRT5, KRT6B, KRT7, KRT8, LAG3, LAMC3, LARS1, LGR5, LPL, LRP2, LTBP2, LUM, LYVE1, MADCAM1, MAPK1, MEDAG, MET, MLN, MLPH, MMP1, MMRN1, MMRN2, MRC1, MS4A1, MUC1, MUC2, MUC5AC, MUC5B, MYH11, MYLK, NCAM1, NCR1, NEUROD1, NEUROG3, NKG7, NOS1, NPHS2, NRXN1, NTS, OLFM4, PDCD1, PDCD1LG2, PDE4A, PDGFRA, PDGFRB, PDK4, PDPN, PECAM1, PGR, PHGR1, PIM1, PLIN1, PODXL, POLR2A, POSTN, POU2F3, PPARG, PRDM1, PRF1, PTGDS, PTGS2, PYY, RARRES1, RBP2, RGS5, RSPO3, S100A9, SCGB1A1, SCGB3A2, SDC1, SELE, SELL, SERPINA3, SFTPD, SH2D6, SLC12A1, SLC12A3, SLC26A4, SLC2A1, SLC4A1, SLC4A9, SLC8A1, SNCA, SNCG, SOX10, SPP1, SST, STAT1, STAT3, STAT4, STC1, TAGLN, TAP1, TAP2, TBX21, TCL1A, TFPI, TGFB1, THY1, TIGIT, TLR2, TLR4, TLR9, TMPRSS2, TNF, TNFRSF17, TNFRSF4, TNFRSF9, TNFSF13B, TNFSF9, TOMM7, TP63, TPD52, UMOD, UPK3B, VCAM1, VCAN, VEGFA, VIM, VWF, or WARS1 gene sequence. In embodiments, the oligonucleotide probe binds to External RNA Controls Consortium (ERCC) molecules. In embodiments, the ERCC molecule is ERCC-00019, ERCC-00024, ERCC-00059, ERCC-00142, or ERCC-00143.

[0092] In embodiments, the gene sequence includes a ACKR1, ACKR4, ACTA2, ADIPOQ, ANGPT2, ANKRD29, AQP1, CAVIN2, CCL2, CCL3, CCL4, CCL5, CCR2, CCR5, CCR7, CD14, CD163, CD19, CD1C, CD2, CD247, CD27, CD274, CD276, CD28, CD33, CD34, CD36, CD38, CD3D, CD3E, CD4, CD40, CD40LG, CD44, CD47, CD68, CD70, CD74, CD79A, CD80, CD86, CD8A, CEACAM8, CLEC9A, COL1A1, CSF1R, CSPG4, CTLA4, CTSS, CX3CL1, CX3CR1, CXCL10, CXCL11, CXCL13, CXCL9, CXCR3, CXCR4, CXCR5, CXCR6, CYP1A1, DES, DGKG, DPT, EGFR, EOMES, EPCAM, ERBB2, ESM1, FAP, FAS, FASN, FBLN1, FBN1, FCAR, FCGR1A, FCGR3A, FGFR4, FN1, FOXP3, FSCN1, GATA3, GATM, GNLY, GPC1, GPR183, GZMA, GZMB, GZMH, GZMK, HAVCR2, HLA-A, HLA-DRA, HOXD8, ICOSLG, ID2, IDO1, IFNG, IGHA1, IGHD, IGHG1, IGHM, IL10, IL10RA, IL17A, IL1B, IL2RA, IL2RB, IL6, IL7R, IRF1, ITGAM, ITGAX, ITGB2, JCHAIN, KDR, KIT, KLRB1, KLRD1, KLRF1, KLRK1, KRAS, LAG3, LAMC3, LARS1, LPL, LTBP2, LUM, LYVE1, MADCAM1, MAPK1, MET, MKI67, MMP1, MMRN1, MMRN2, MRC1, MS4A1, MYH11, NCAM1, NCR1, NKG7, NRXN1, PDCD1, PDCD1LG2, PDE4A, PDGFRA, PDGFRB, PDK4, PECAM1, PIM1, PLIN1, POSTN, PPARG, PRDM1, PRF1, PTGS2, RARRES1, RGS5, RSPO3, S100A9, SDC1, SELE, SELL, SLC2A1, SNCA, SNCG, SOX10, STAT1, STAT4, STC1, TAGLN, TAP1, TAP2, TBX21, TCL1A, TFPI, TGFB1, THY1, TIGIT, TLR2, TLR4, TLR9, TNF, TNFRSF17, TNFRSF4, TNFRSF9, TNFSF13B, TNFSF9, VCAM1, VCAN, VEGFA, VIM, VWF, or WARS1 gene sequence.

[0093] In embodiments, the gene sequence is CCL2, CCR2, CD14, CD19, CD274, CD28, CD3D, CD3E, CD4, CD44, CD8A, CTLA4, FOXP3, HAVCR2, IFNG, IL2RA, IL2RB, IL7R, MS4A1, PDCD1LG2, PDCD1, TIGIT, CD68, CXCL13, EPCAM, MKI67, IGHG1, IGHA1, COL1A1, ACTA2, LYVE1, MADCAM1, PDGFRB, PECAM1, or THY1. In embodiments, the oligonucleotide probe includes SEQ ID NO:11530 and SEQ ID NO:13586. In embodiments, the oligonucleotide probe includes SEQ ID NO:11534 and SEQ ID NO:13590. In embodiments, the oligonucleotide probe includes SEQ ID NO:11540 and SEQ ID NO:13596. In embodiments, the oligonucleotide probe includes SEQ ID NO:11544 and SEQ ID NO:13600. In embodiments, the oligonucleotide probe includes SEQ ID NO:11550 and SEQ ID NO:13606. In embodiments, the oligonucleotide probe includes SEQ ID NO:11553 and SEQ ID NO:13609. In embodiments, the oligonucleotide probe includes SEQ ID NO:11563 and SEQ ID NO:13619. In embodiments, the oligonucleotide probe includes SEQ ID NO:11565 and SEQ ID NO:13621. In embodiments, the oligonucleotide probe includes SEQ ID NO:11572 and SEQ ID NO:13628. In embodiments, the oligonucleotide probe includes SEQ ID NO:11570 and SEQ ID NO:13626. In embodiments, the oligonucleotide probe includes SEQ ID NO:11583 and SEQ ID NO:13639. In embodiments, the oligonucleotide probe includes SEQ ID NO:11590 and SEQ ID NO:13646. In embodiments, the oligonucleotide probe includes SEQ ID NO:11605 and SEQ ID NO:13661. In embodiments, the oligonucleotide probe includes SEQ ID NO:11618 and SEQ ID NO:13674. In embodiments, the oligonucleotide probe includes SEQ ID NO:11626 and SEQ ID NO:13682. In embodiments, the oligonucleotide probe includes SEQ ID NO:11638 and SEQ ID NO:13694. In embodiments, the oligonucleotide probe includes SEQ ID NO:11640 and SEQ ID NO:13696. In embodiments, the oligonucleotide probe includes SEQ ID NO:11644 and SEQ ID NO:13700. In embodiments, the oligonucleotide probe includes SEQ ID NO:11666 and SEQ ID NO:13722. In embodiments, the oligonucleotide probe includes SEQ ID NO:11671 and SEQ ID NO:13727. In embodiments, the oligonucleotide probe includes SEQ ID NO:11673 and SEQ ID NO:13729. In embodiments, the oligonucleotide probe includes SEQ ID NO:11696 and SEQ ID NO:13752. In embodiments, the oligonucleotide probe includes SEQ ID NO:11718 and SEQ ID NO:13774. In embodiments, the oligonucleotide probe includes SEQ ID NO:11741 and SEQ ID NO:13797. In embodiments, the oligonucleotide probe includes SEQ ID NO:11763 and SEQ ID NO:13819. In embodiments, the oligonucleotide probe includes SEQ ID NO:11764 and SEQ ID NO:13820. In embodiments, the oligonucleotide probe includes SEQ ID NO:11727 and SEQ ID NO:13783. In embodiments, the oligonucleotide probe includes SEQ ID NO:11726 and SEQ ID NO:13782. In embodiments, the oligonucleotide probe includes SEQ ID NO:11443 and SEQ ID NO:13499. In embodiments, the oligonucleotide probe includes SEQ ID NO:11430 and SEQ ID NO:13486. In embodiments, the oligonucleotide probe includes SEQ ID NO:11472 and SEQ ID NO:13528. In embodiments, the oligonucleotide probe includes SEQ ID NO:11474 and SEQ ID NO:13530. In embodiments, the oligonucleotide probe includes SEQ ID NO:11490 and SEQ ID NO:13546. In embodiments, the oligonucleotide probe includes SEQ ID NO:11492 and SEQ ID NO:13548. In embodiments, the oligonucleotide probe includes SEQ ID NO:11518 and SEQ ID NO:13574.

[0094] In embodiments, the cell forms part of a tissue in situ. In embodiments, the cell is an isolated single cell. In embodiments, the cell is a prokaryotic cell. In embodiments, the cell is a eukaryotic cell. In embodiments, the cell is a bacterial cell (e.g., a bacterial cell or bacterial spore), a fungal cell (e.g., a fungal spore), a plant cell, or a mammalian cell. In embodiments, the cell is a stem cell. In embodiments, the stem cell is an embryonic stem cell, a tissue-specific stem cell, a mesenchymal stem cell, or an induced pluripotent stem cell. In embodiments, the cell is an endothelial cell, muscle cell, myocardial, smooth muscle cell, skeletal muscle cell, mesenchymal cell, epithelial cell; hematopoietic cell, such as lymphocytes, including T cell, e.g., (Th1 T cell, Th2 T cell, ThO T cell, cytotoxic T cell); B cell, pre-B cell; monocytes; dendritic cell; neutrophils; or a macrophage. In embodiments, the cell is a stem cell, an immune cell, a cancer cell (e.g., a circulating tumor cell or cancer stem cell), a viral-host cell, or a cell that selectively binds to a desired target. In embodiments, the cell includes a T cell receptor gene sequence, a B cell receptor gene sequence, or an immunoglobulin gene sequence. In embodiments, the cell includes a Toll-like receptor (TLR) gene sequence. In embodiments, the cell includes a gene sequence corresponding to an immunoglobulin light chain polypeptide and a gene sequence corresponding to an immunoglobulin heavy chain polypeptide. In embodiments, the cell is a genetically modified cell. In embodiments, the cell is an adherent cell (e.g., epithelial cell, endothelial cell, or neural cell). Adherent cells are usually derived from tissues of organs and attach to a substrate (e.g., epithelial cells adhere to an extracellular matrix coated substrate via transmembrane adhesion protein complexes). Adherent cells typically require a substrate, e.g., tissue culture plastic, which may be coated with extracellular matrix (e.g., collagen and laminin) components to increase adhesion properties and provide other signals needed for growth and differentiation. In embodiments, the cell is a neuronal cell, an endothelial cell, epithelial cell, germ cell, plasma cell, a muscle cell, peripheral blood mononuclear cell (PBMC), a myocardial cell, or a retina cell. In embodiments, the cell is a suspension cell (e.g., a cell free-floating in the culture medium, such a lymphoblast or hepatocyte). In embodiments, the cell is a glial cell (e.g., astrocyte, radial glia), pericyte, or stem cell (e.g., a neural stem cell). In embodiments, the cell is a neuronal cell. In embodiments, the cell is an endothelial cell. In embodiments, the cell is an epithelial cell. In embodiments, the cell is a germ cell. In embodiments, the cell is a plasma cell. In embodiments, the cell is a muscle cell. In embodiments, the cell is a peripheral blood mononuclear cell (PBMC). In embodiments, the cell is a myocardial cell.

[0095] In another aspect is provided a cell including the oligonucleotide probe as described herein. In embodiments, the cell is an immune cell. In embodiments, the immune cell is a granulocyte, a mast cell, a monocyte, a neutrophil, a dendritic cell, or a natural killer (NK) cell. In embodiments, the immune cell is an adaptive cell, such as a T cell, NK cell, or a B cell. In embodiments, the cell includes a T cell receptor gene sequence, a B cell receptor gene sequence, or an immunoglobulin gene sequence. In embodiments, the immune cell is a granulocyte. In embodiments, the immune cell is a mast cell. In embodiments, the immune cell is a monocyte. In embodiments, the immune cell is a neutrophil. In embodiments, the immune cell is a dendritic cell. In embodiments, the immune cell is a natural killer (NK) cell. In embodiments, the immune cell is a T cell. In embodiments, the immune cell is a B cell. In embodiments, the cell includes a T cell receptor gene sequence. In embodiments, the cell includes a B cell receptor gene sequence. In embodiments, the cell includes an immunoglobulin gene sequence. In embodiments, the plurality of target nucleic acids includes non-contiguous regions of a nucleic acid molecule. In embodiments, the non-contiguous regions include regions of a VDJ recombination of a B cell or T cell. In embodiments, the target nucleic acid molecule is in a cell or tissue.

[0096] In embodiments, the cell is a cancer cell. In embodiments, the cancer is lung cancer, colorectal cancer, skin cancer, colon cancer, pancreatic cancer, breast cancer, cervical cancer, lymphoma, leukemia, or a cancer associated with aberrant K-Ras, aberrant APC, aberrant Smad4, aberrant p53, or aberrant TGFβ. In embodiments, the cancer cell includes a ERBB2, KRAS, TP53, PIK3CA, or FGFR2 gene. In embodiments, the cancer cell includes a HER2 gene. In embodiments, the cancer cell includes a cancer-associated gene (e.g., an oncogene associated with kinases and genes involved in DNA repair) or a cancer-associated biomarker. A “biomarker” is a substance that is associated with a particular characteristic, such as a disease or condition. A change in the levels of a biomarker may correlate with the risk or progression of a disease or with the susceptibility of the disease to a given treatment. In embodiments, the cancer is Acute Myeloid Leukemia, Adrenocortical Carcinoma, Bladder Urothelial Carcinoma, Breast Ductal Carcinoma, Breast Lobular Carcinoma, Cervical Carcinoma, Cholangiocarcinoma, Colorectal Adenocarcinoma, Esophageal Carcinoma, Gastric Adenocarcinoma, Glioblastoma Multiforme, Head and Neck Squamous Cell Carcinoma, Hepatocellular Carcinoma, Kidney Chromophobe Carcinoma, Kidney Clear Cell Carcinoma, Kidney Papillary Cell Carcinoma, Lower Grade Glioma, Lung Adenocarcinoma, Lung Squamous Cell Carcinoma, Mesothelioma, Ovarian Serous Adenocarcinoma, Pancreatic Ductal Adenocarcinoma, Paraganglioma & Pheochromocytoma, Prostate Adenocarcinoma, Sarcoma, Skin Cutaneous Melanoma, Testicular Germ Cell Cancer, Thymoma, Thyroid Papillary Carcinoma, Uterine Carcinosarcoma, Uterine Corpus Endometrioid Carcinoma, or Uveal Melanoma. In embodiments, the cancer-associated gene is a nucleic acid sequence identified within The Cancer Genome Atlas Program.

[0097] In an aspect is provided a tissue including the oligonucleotide probe as described herein. In embodiments, the tissue is a tissue section. In embodiments, the tissue section includes a tissue or a cell (e.g., plurality of cells such as blood cells). In embodiments, the tissue section includes one or more cells. In embodiments, the thickness of the tissue section is about 1 μm to about 20 μm. In embodiments, the thickness of the tissue section is about 5 μm to about 12 μm. In embodiments, the thickness of the tissue section is about 8 μm to about 15 μm. In embodiments, the thickness of the tissue section is about 1 μm, about 2 μm, about 3 μm, about 4 μm, about 5 μm, about 6 μm, about 7 μm, about 8 μm, about 9 μm, about 10 μm, about 11 μm, about 12 μm, about 13 μm, about 14 μm, or about 15 μm. In embodiments, the thickness of the tissue section is about 1 μm. In embodiments, the thickness of the tissue section is about 2 μm. In embodiments, the thickness of the tissue section is about 3 μm. In embodiments, the thickness of the tissue section is about 4 μm. In embodiments, the thickness of the tissue section is about 5 μm. In embodiments, the thickness of the tissue section is about 6 μm. In embodiments, the thickness of the tissue section is about 7 μm. In embodiments, the thickness of the tissue section is about 8 μm. In embodiments, the thickness of the tissue section is about 9 μm. In embodiments, the thickness of the tissue section is about 10 μm. In embodiments, the thickness of the tissue section is about 11 μm. In embodiments, the thickness of the tissue section is about 12 μm. In embodiments, the thickness of the tissue section is about 13 μm. In embodiments, the thickness of the tissue section is about 14 μm. In embodiments, the thickness of the tissue section is about 15 μm. In embodiments, the thickness of the tissue section is less than about 10 μm. In embodiments, the thickness of the tissue section is less about 6 μm, 7 μm, 8 μm, 9 μm or 10 μm. In embodiments, the cell or tissue is obtained via Laser capture microdissection (LCM). LCM is a method for isolating in micrometer-scale tissue or even single cells while retaining spatial information to link histology with molecular measurements. In LCM, a region of interest in the tissue section is isolated through laser cutting.

[0098] Tissue sections, e.g., tumor tissue samples, may be obtained surgically or using a laparoscope. A tissue section may be a tissue sample obtained from any part of the body to examine it for disease or injury, e.g., presence of cancer tissue or cells, or the extent or characteristics thereof. In particular embodiments, the tissue section includes abdominal tissue, bone, bone marrow, breast tissue, endometrial tissue, kidney tissue, liver tissue, lung or chest tissue, lymph node, nerve tissue, skin, testicular tissue, head or neck tissue, or thyroid tissue. In certain embodiments, the tissue is obtained from brain, breast, skin, bone, joint, skeletal muscle, smooth muscle, red bone marrow, thymus, lymphatic vessel, thoracic duct, spleen, lymph node, nasal cavity, pharynx, larynx, trachea, bronchus, lung, oral cavity, esophagus, liver, stomach, small intestine, large intestine, rectum, anus, spinal cord, nerve, pineal gland, pituitary gland, thyroid gland, thymus, adrenal gland, pancreas, ovary, testis, heart, blood vessel, kidney, uterus, urinary bladder, urethra, prostate gland, penis, prostate, testis, scrotum, ductus deferens, mammary glands, ovary, uterus, vagina, or uterine tube.

[0099] In embodiments, the tissue section includes a tissue or a cell. Biological tissue samples suitable for use with the methods and systems described herein generally include any type of tissue samples collected from living or dead subjects, such as, for example, tumor tissue and autopsy samples. Tissue samples may be collected and processed using the methods and systems described herein and subjected to microscopic analysis immediately following processing, or may be preserved and subjected to microscopic analysis at a future time, e.g., after storage for an extended period of time. In some embodiments, the methods described herein may be used to preserve tissue samples in a stable, accessible and fully intact form for future analysis. For example, tissue samples, such as, e.g., human tumor tissue samples, may be processed as described herein and cleared to remove a plurality of cellular components, such as, e.g., lipids, and then stored for future analysis. In some embodiments, the methods and systems described herein may be used to analyze a fresh tissue section. In some embodiments, the methods and systems described herein may be used to analyze a previously-preserved (e.g., previously fixed) or stored tissue section (e.g., tissue sample). For example, in some embodiments a previously-preserved tissue sample that has not been subjected to a sample preparation process described herein may be processed and analyzed as described herein. In particular methods, a tissue sample is frozen prior to being processed as described herein

[0100] The probe sequences described herein may be screened to avoid common six-base-cutter restriction enzyme recognition sites to aid in the ease of manipulation for conventional molecular cloning techniques. Selected sequences are additionally subjected to predicted secondary structure analysis, and those with the least secondary structure are chosen for further evaluation. Any program known in the art can be used to predict secondary structure, such as the MFOLD program (Zuker, 2003, Nucleic Acids Res. 31 (13):3406-15; Mathews et al., 1999, J. Mol. Biol. 288:911-940).

[0101] In embodiments, the probe oligonucleotide includes one or more modifications, for example the oligonucleotide may include nucleotides modified at the base moiety, sugar moiety or phosphate backbone to improve, e.g., the stability, hybridization, or solubility of the molecule. For example, the deoxyribose phosphate backbone of the nucleic acids can be modified to generate peptide nucleic acids (see Hyrup et al., 1996, Bioorganic & Medicinal Chemistry 4(1):5-23). As used herein, the terms “peptide nucleic acids” (PNAs) refer to nucleic acid mimics, e.g., DNA mimics, in which the deoxyribose phosphate backbone is replaced by a pseudopeptide backbone and only the four natural nucleobases are retained. The neutral backbone of PNAs has been shown to allow for specific hybridization to DNA and RNA under conditions of low ionic strength.

[0102] In an aspect is provided computer program products for use in conjunction with a computer system having a processor and a memory connected to the processor. The computer program products of the disclosure comprise a computer readable storage medium having a computer program mechanism encoded or embedded thereon. The computer program mechanism can be loaded into the memory of the computer and cause the processor to execute the steps of the methods of the disclosure. The methods described herein can preferably be implemented by use of the following computer systems, and according to the following methods. An exemplary computer system suitable for implementation of the methods of this disclosure comprises internal components and being linked to external components. The external components include one or more storage device(s). For example, a storage device can be one or more hard disks which are typically packaged together with the processor and memory. Other external components include user interface device, which can be a monitor and a keyboard, together with pointing device.

[0103] In an aspect is provided a device configured to detect multiple targets as described herein. In embodiments, the device includes a microscope. Examples of suitable microscopes include, but are not limited to, the Zeiss Axioscope 5 multichannel microscope (Carl Zeiss Microscopy, LLC), the Olympus BX63 automated microscope (Olympus Scientific Solutions Americas Corp), and the Nikon Eclipse Ti2 microscope (Nikon Instruments, Inc.). In embodiments, the device includes one or more light sources, one or more objective lenses, one or more sample carriers (e.g., sample holders, sample stages, and/or translation stages), one or more tube lenses, one or more image sensors or cameras, one or more processors or controllers, one or more additional optical components (e.g., lenses, mirrors, prisms, beam-splitters, optical filters, colored glass filters, narrowband interference filters, broadband interference filters, dichroic reflectors, diffraction gratings, apertures, shutters, optical fibers, optical waveguides, and/or acousto-optic modulators), or any combination thereof. In embodiments, the device includes a focus mechanism, e.g., an autofocus mechanism. In embodiments, the device is be configured to perform multichannel imaging, e.g., multichannel fluorescence imaging including the use of excitation light at one or more excitation wavelengths, and imaging the emitted fluorescence at two or more different emission wavelengths.

[0104] In embodiments, the device includes one or more image sensors (or cameras) that may be the same or may be different, and may include any of a variety of image sensors including but not limited to, photodiode arrays, charge-coupled device (CCD) sensors or cameras, or complementary metal-oxide-semiconductor (CMOS) image sensors or cameras. In embodiments, the one or more image sensors may comprise one-dimensional (linear) or two-dimensional pixel array sensors. In embodiments, the one or more image sensors may comprise monochrome image sensors (e.g., configured to capture greyscale images) or color image sensors (e.g., configured to capture RGB or color images). In embodiments, the one or more image sensors may be used to capture single images, e.g., a single image for each cycle of a plurality of cycles. In embodiments, the one or more image sensors may be used to capture a series of images, e.g., a series of images during each cycle of a plurality of cycles. In embodiments, a series of images may include images (or video frames) that correspond to images captured before, during, and/or after an event, e.g., before, during, and/or after addition of a probe to the sample being imaged. In embodiments, a series of images includes 2 images, 3 images, 4 images, 5 images, 10 images, 20 images, 30 images, 40 images, 50 images, 100 images, 200 images, 300 images, 400 images, 500 images, 1,000 images, or more than 1,000 images.

[0105] In embodiments, the device is configured to perform volumetric imaging (or optical sectioning). In embodiments, the imaging includes the acquisition of a plurality (or “stack”) of two-dimensional (2D) images to form a three-dimensional (3D) representation of the sample, where each two-dimensional image is aligned with the other images of the plurality in the sample plane (e.g., the X-Y plane), but is offset from the other two-dimensional images in a direction parallel to the optical axis of the imaging module (e.g., in the Z-direction). In embodiments, the stack of images may be acquired sequentially. In embodiments, the stack of images may be acquired simultaneously.

[0106] In an aspect is provided a kit, wherein the kit includes a plurality of probes described herein. In embodiments, the individual components of the kit can be alternatively contained either together in one storage container or separately in two or more storage containers (e.g., separate bottles or vials). In embodiments, the kit includes nucleotides in a buffer. In embodiments, the kit includes a buffer. For example, the sequencing solution and/or the chase solution may include a buffer such as ethanolamine (EA), tris(hydroxymethyl)aminomethane (Tris), glycine, a carbonate salt, a phosphate salt, a borate salt, 2-dimethyalaminomethanol (DMEA), 2-diethyalaminomethanol (DEEA), N,N,N′,N′-tetramethylethylenediamine (TEMED), and N,N,N′,N′-tetraethylethylenediamine (TEEDA), and combinations thereof. For example, the buffer may Tris-HCl (pH 9.2 at 25° C.), ammonium sulfate, MgCl₂, 0.1% Tween® 20, and dNTPs.

[0107] In embodiments, the kit includes a first plurality of nucleic acid molecules, wherein each nucleic acid molecule of the first plurality includes a first end, a backbone sequence including a first sequencing primer sequence, and a second end, wherein the first end includes a sequence selected from SEQ ID NO:11428 to SEQ ID NO:13483 and the second end includes a sequence selected from SEQ ID NO:13484 to SEQ ID NO:15539; and a second plurality of nucleic acid molecules, wherein each nucleic acid molecule of the second plurality includes a first end, a backbone sequence including a second sequencing primer sequence, and a second end, wherein the first end includes a sequence selected from SEQ ID NO:11428 to SEQ ID NO:13483 and the second end includes a sequence selected from SEQ ID NO:13484 to SEQ ID NO:15539. In embodiments, the kit includes a third, fourth, fifth, and sixth plurality of nucleic acid molecules, wherein each plurality includes a plurality of nucleic acid molecules with a different sequencing primer sequence (e.g., a sequence provided herein).

[0108] In embodiments, the kit is stored for 1 to 90 days. In embodiments, the kit is stored for greater than 90 days. In embodiments, the kit is stored for 1 to 30 days. In embodiments, the kit is stored for 1, 5, 7, 14, 21, 30, 45, 60, 75, 90, or more days. In embodiments, the kit is stored at less than about 25° C. In embodiments, the kit is stored at less than about 5° C. In embodiments, the kit is stored at about 4° C. In embodiments, the kit is stored in the dark (e.g., in the absence of light, such as visible light or UV light). In embodiments, the kit is stored at 2-8° C. In embodiments, the kit is stored for at least 1 day, at least 2 days, at least 3 days, or at least 7 days. In embodiments, the kit is stored for about 1 week, about 2 weeks, about 3 weeks, about 4 weeks, about 5 weeks, about 6 weeks, about 7 weeks, or about 8 weeks. In embodiments, the kit is stored for about 1 month, about 2 months, about 3 months, about 4 months, about 5 months, about 6 months, about 7 months, about 8 months, about 9 months, about 10 months, about 11 months, or about 12 months. In embodiments, the kit is stored at about 2° C.
[0109] 8° C., about 20° C.-30° C., or about 4° C.-37° C. In embodiments, the kit is stored at about −5° C. to −30° C. and protected from light. In embodiments, the kit is stored at about 2° C.-8° C. and protected from light. In embodiments, the kit is stored at about 20° C.-30° C. and protected from light. In embodiments, the kit is stored at or about 4° C.-37° C. and protected from light. In embodiments, the kit includes a polymerase. In embodiments, the kit includes a ligase.

[0110] In embodiments, the kit can further include one or more biological stain(s) (e.g., any of the biological stains as described herein). For example, the kit can further include eosin and hematoxylin. In other examples, the kit can include a biological stain such as acridine orange, Bismarck brown, carmine, Coomassie blue, crystal violet, DAPI, eosin, ethidium bromide, acid fuchsine, hematoxylin, Hoechst stains, iodine, methyl green, methylene blue, neutral red, Nile blue, Nile red, osmium tetroxide, propidium iodide, rhodamine, safranin, or any combination thereof. In embodiments, the kit is designed for staining tissue samples for imaging and detecting target molecules (e.g., proteins) can be significantly expanded beyond the inclusion of fluorophores. For instance, the kit can include eosin and hematoxylin, which are classic histological stains. Eosin, a red dye, typically stains acidic components of the cell such as cytoplasmic proteins, while hematoxylin, a basic dye, binds to nucleic acids, coloring the cell nucleus blue. This combination is widely used in histopathology for detailed tissue structure visualization. Moreover, the kit can encompass stains such as acridine orange, a nucleic acid-selective fluorescent cationic dye, and Bismarck brown, which is often used for staining backgrounds in histological tissue sections. Carmine, another potential inclusion, is a natural red dye used for staining glycogen, while Coomassie blue is a popular choice for protein staining in gel electrophoresis. Crystal violet, a triarylmethane dye, can be included for staining cell walls and nuclei, and DAPI, a fluorescent stain that binds strongly to A-T rich regions in DNA, is useful in fluorescence microscopy. Ethidium bromide, a fluorescent intercalator, is also a valuable addition for its role in nucleic acid staining, especially in gel electrophoresis. Further, the kit can include acid fuchsine, used in Masson's trichrome stain; Hoechst stains, which are cell-permeable, DNA-specific blue fluorescent dyes; and iodine, commonly used in Gram staining and for staining starch in plant cells. Methyl green and methylene blue, both traditional histological stains, can be included for their affinity towards nucleic acids. Neutral red, a vital stain that accumulates in lysosomes, Nile blue and Nile red, both used for staining lipids, and osmium tetroxide, a heavy metal stain for lipid bilayers in electron microscopy, can be part of the kit. Propidium iodide, a popular red-fluorescent nuclear and chromosome counterstain, along with rhodamine, may be utilized. Safranin, commonly used in Gram staining, can be included for its ability to stain cell components like nuclei, cytoplasm, and cell walls in various colors, enhancing the contrast and detail in tissue imaging.

[0111] In embodiments, the kit includes a flow cell, for example a solid support as described herein. In embodiments, the kit includes labeled nucleotides including differently labeled nucleotides, enzymes, buffers, oligonucleotides, and related solvents and solutions. In embodiments, the kit includes one or more oligonucleotide probes (e.g., an oligonucleotide probe as described herein). The kit may also include a template nucleic acid (DNA and/or RNA), one or more primer polynucleotides, nucleoside triphosphates (including, e.g., deoxyribonucleotides, dideoxynucleotides, ribonucleotides, labeled nucleotides, and/or modified nucleotides), buffers, salts, and/or labels (e.g., fluorophores). In embodiments, the kit includes components useful for circularizing template polynucleotides using a ligation enzyme (e.g., Circligase™ enzyme, Taq DNA Ligase, HiFi Taq DNA Ligase, T4 ligase, SplintR® ligase, or Ampligase® DNA Ligase). For example, such a kit further includes the following components: (a) reaction buffer for controlling pH and providing an optimized salt composition for a ligation enzyme (e.g., Circligase™ enzyme, Taq DNA Ligase, HiFi Taq DNA Ligase, T4 ligase, SplintR® ligase, or Ampligase® DNA Ligase), and (b) ligation enzyme cofactors. In embodiments, the kit further includes instructions for use thereof. In embodiments, kits described herein include a polymerase. In embodiments, the polymerase is a DNA polymerase. In embodiments, the DNA polymerase is a thermophilic nucleic acid polymerase. In embodiments, the DNA polymerase is a modified archaeal DNA polymerase. In embodiments, the kit includes a sequencing solution. In embodiments, the sequencing solution include labeled nucleotides including differently labeled nucleotides, wherein the label (or lack thereof) identifies the type of nucleotide. For example, each adenine nucleotide, or analog thereof; a thymine nucleotide; a cytosine nucleotide, or analog thereof; and a guanine nucleotide, or analog thereof may be labeled with a different fluorescent label. In embodiments, the kit includes a modified terminal deoxynucleotidyl transferase (TdT) enzyme.

[0112] In embodiments, the kit includes a microplate, and reagents for sample preparation and purification, amplification, and/or sequencing (e.g., one or more sequencing reaction mixtures). In embodiments, the kit includes a flow cell, and reagents for sample preparation and purification, amplification, and/or sequencing (e.g., one or more sequencing reaction mixtures). In embodiments, the kit includes reagents for protein detection includes a plurality of specific binding agents linked to an oligonucleotide (e.g., DNA-conjugated antibodies).

[0113] In embodiments, the kit further includes a ligase. In embodiments, the kit includes one or more ligases. In embodiments, the kit includes a plurality of ligases. In embodiments, the kit further includes a polymerase. In embodiments, the kit further includes one or more polymerases. In embodiments, the kit includes a plurality of polymerases. In embodiments, the kit includes a ligase and one or more polymerases. In embodiments, the one or more polymerases include a reverse transcriptase. Exemplary reverse transcriptases include, but are not limited to, HIV-1 reverse transcriptase from human immunodeficiency virus type 1 (PDB 1HMV), HIV-2 reverse transcriptase from human immunodeficiency virus type 2, M-MLV reverse transcriptase from the Moloney murine leukemia virus, AMV reverse transcriptase from the avian myeloblastosis virus, and Telomerase reverse transcriptase. In embodiments, the polymerase is a Thermus thermophilus (Tth) DNA polymerase or mutant thereof. In embodiments, the polymerase is a Reverse Transcription Xenopolymerase (RTX). In embodiments, the polymerase is a mutant M-MLV reverse transcriptase from the Moloney murine leukemia virus.

[0114] In embodiments, the kit includes, without limitation, nucleic acid primers, probes, adapters, enzymes, and the like, and are each packaged in a container, such as, without limitation, a vial, tube or bottle, in a package suitable for commercial distribution, such as, without limitation, a box, a sealed pouch, a blister pack and a carton. The package typically contains a label or packaging insert indicating the uses of the packaged materials. As used herein, “packaging materials” includes any article used in the packaging for distribution of reagents in a kit, including without limitation containers, vials, tubes, bottles, pouches, blister packaging, labels, tags, instruction sheets and package inserts.

[0115] In addition to the above components, the kits may further include instructions for practicing the subject methods. These instructions may be present in the subject kits in a variety of forms, one or more of which may be present in the kit. One form in which these instructions may be present is as printed information on a suitable medium or substrate, e.g., a piece or pieces of paper on which the information is printed, in the packaging of the kit, in a package insert, etc. Yet another means would be a computer readable medium, e.g., diskette, CD, digital storage medium, etc., on which the information has been recorded. Yet another means that may be present is a website address which may be used via the Internet to access the information at a removed site.

[0116] In embodiments, kit includes the flow cell assembly as described herein and a flow cell carrier (e.g., a flow cell carrier as described in U.S. Pat. No. 11,747,262, which is incorporated herein by reference for all purposes). In embodiments, the kit includes a sequencing primer, wherein the sequencing primer includes the sequence: SEQ ID NO:11419, SEQ ID NO:11420, SEQ ID NO:11421, SEQ ID NO:11422, SEQ ID NO:11423, SEQ ID NO:11424, SEQ ID NO:11425, or SEQ ID NO:11426. In embodiments, the sequencing primer includes the sequence: SEQ ID NO:15540, SEQ ID NO: 15541, SEQ ID NO: 15542, SEQ ID NO: 15543, SEQ ID NO: 15544, and SEQ ID NO: 15545. In embodiments, the second end includes a sequence selected from SEQ ID NO:13484 to SEQ ID NO:15538. In embodiments, the kit includes a polymerase and a plurality of deoxynucleotides (dNTPs).

[0117] In an aspect is provided a solid support comprising one or more tissue sections, wherein the tissues include a plurality of compositions and/or complexes as described herein. In embodiments, the tissue includes liver tissue, kidney tissue, bone tissue, lung tissue, thymus tissue, adrenal tissue, skin tissue, bladder tissue, colon tissue, spleen tissue, or brain tissue. In embodiments, the tissue section is from adrenal glands, appendix, bladder, bones, bone marrow, brain, lung bronchi, diaphragm, ears, esophagus, eyes, fallopian tubes, gallbladder, genitals, heart, hypothalamus, joints, kidneys, large intestine, larynx, liver, lungs, lymph nodes, mammary glands, mesentery, mouth, nasal cavity, nose, ovaries, pancreas, pineal gland, parathyroid glands, pharynx, pituitary gland, prostate, rectum, salivary glands, skeletal muscles, skin, small intestine, spinal cord, spleen, stomach, thymus gland, thyroid, trachea, tongue, ureters, urethra, uterus, vagina, placenta, testes, nails, vas deferens, seminal vesicles, bulbourethral glands, penis, scrotum, parathyroid glands, tonsils, nerves, subcutaneous tissue, olfactory epithelium, or cerebellum.

### III. Methods

[0118] In an aspect is provided a method of detecting a nucleic acid molecule. In embodiments, the nucleic acid molecule is in a cell or tissue. In embodiments, the nucleic acid molecule includes a gene sequence. In embodiments, the method includes contacting the nucleic acid molecule with an oligonucleotide probe, wherein the probe includes a sequence provided herein, and binding the oligonucleotide probe to the nucleic acid molecule. In embodiments, the oligonucleotide probe includes a first sequence and a second sequence, wherein the first sequence is as a first end and the second sequence is at a second end. In embodiments, the first sequence selected from SEQ ID NO:11428 to SEQ ID NO:13483 and a second sequence selected from SEQ ID NO:13484 to SEQ ID NO:15539. In embodiments, the oligonucleotide probe includes a primer binding sequence, or complement thereof, selected from the following: SEQ ID NO:15540, SEQ ID NO:15541, SEQ ID NO:15542, SEQ ID NO:15543, SEQ ID NO:15544, or SEQ ID NO:15545. In embodiments, the first sequence is selected from SEQ ID NO:5710 to SEQ ID NO:11418 and the second sequence is selected from SEQ ID NO:1 to SEQ ID NO:5709. In embodiments, the method includes sequencing the first sequence and/or the second sequence. In embodiments, prior to sequencing, the method includes amplifying the oligonucleotide probe. For example, following annealing the oligonucleotide probe to the nucleic acid molecule, the first sequence and the second sequence are ligated together to form a circular polynucleotide. The circular polynucleotide may then be amplified using rolling circle amplification (RCA) to form amplification produces including copies of the first sequence and the second sequence (and/or complements thereof) which may then be sequenced. In embodiments, amplification is performed at a temperature between or between about 20° C. and about 60° C. In embodiments, amplification is performed at a temperature between or between about 30° C. and about 40° C. In some embodiments, the amplification step, such as the rolling circle amplification (RCA) is performed at a temperature between at or about 25° C. and at or about 50° C., e.g., 25° C., 27° C., 29° C., 31° C., 33° C., 35° C., 37° C., 39° C., 41° C., 43° C., 45° C., 47° C., or 49° C.

[0119] In embodiments the probe oligonucleotides include a sequence provided herein, or a sequence with 80% or more homology with a sequence described herein. In embodiments, the probe oligonucleotide includes a sequence that is 85%, 90%, 95%, 96%, 97%, 98%, 99%, or 100% identical to a sequence described herein.

[0120] In embodiments, the methods of detection are performed in multiplex assays, whereby a plurality of target molecules are detected in the same assay (a single reaction mixture). In embodiments, the plurality of target molecules is detected simultaneously. In embodiments, the plurality of target molecules detected in the same assay is at least 5 different target molecules, at least 10 different target molecules, at least 20 different target molecules, at least 50 different target molecules, at least 75 different target molecules, at least 100 different target molecules, at least 200 different target molecules, at least 500 different target molecules, or at least 750 different target molecules, or at least 1000 different target molecules. In embodiments, the plurality of target molecules detected in the same assay is up to 50 different target molecules, up to 100 different target molecules, up to 150 different target molecules, up to 200 different target molecules, up to 300 different target molecules, up to 500 different target molecules, up to 750 different target molecules, up to 1000 different target molecules, up to 2000 different target molecules, or up to 5000 different target molecules. In embodiments, the plurality of target molecules detected is any range in between the foregoing numbers of different target molecules, such as, but not limited to, from 20 to 50 different target molecules, from 50 to 200 different target molecules, from 100 to 1000 different target molecules, or from 500 to 5000 different target molecules.

[0121] In embodiments, the method further includes detecting a target protein molecule. In embodiments, the method includes detecting the target protein molecule in a cell or tissue. In embodiments, the method includes binding a polynucleotide probe to an oligonucleotide, wherein the oligonucleotide is covalently bound to a specific binding agent (e.g., an antibody); detecting the polynucleotide probe, thereby detecting the target molecule. In embodiments, detecting includes serially contacting the oligonucleotides with labeled probes (e.g., labeled oligonucleotides or labeled nucleotides).

[0122] In embodiments, the polynucleotide probe includes a fluorescently labeled probe. The phrase “labeled probes” refers to mixture of nucleic acids that are detectably labeled, e.g., fluorescently labeled, such that the presence of the probe, as well as, any target sequence to which the probe is bound can be detected by assessing the presence of the label. In embodiments, the probes are about 30-300 bases in length, 40-300 bases in length, or 70-300 bases in length. In some embodiments, the probes are relatively uniform in length (e.g., an average length+/−10 bases). The probes may be uniformly labeled based on position of label and/or number of labels within the probe. In some embodiments, the probes are single-stranded. In some embodiments, the probes are double-stranded. Additional detection probes and related properties may be found in, e.g., U.S. Pat. Pub. US 2011/0039735, which is incorporated herein by reference in its entirety. In embodiments, the method includes binding a polynucleotide probe including a first binding sequence and a second binding sequence to an oligonucleotide, wherein the oligonucleotide is attached to the target molecule (e.g., covalently attached to an antibody, wherein the antibody is specifically bound to the target protein molecule); amplifying the polynucleotide probe to form an amplification product comprising one or more copies of the first binding sequence and the second binding sequence; hybridizing a primer to the amplification product and incorporating a labeled nucleotide into the primer, thereby detecting the target protein molecule. In embodiments, the method includes hybridizing a labeled probe to the amplification product and detecting the labeled probe, thereby detecting the target protein molecule. In embodiments, the method includes detecting CD11c, CD20, CD3e, CD31, CD4, CD45RA, CD56, CD8, HLA-DR, Ki-67, PanCK, PD-1, and/or PD-L1.

[0123] In embodiments, prior to contacting a cell or tissue with a probe oligonucleotide, the method further includes immobilizing a cell or tissue section onto a solid support (e.g., a flow cell or well in a microplate). In embodiments, the solid support includes a glass substrate. In embodiments, the glass substrate is a borosilicate glass substrate with a composition including SiO₂, Al₂O₃, B₂O₃, Li₂O, Na₂O, K₂O, MgO, CaO, SrO, BaO, ZnO, TiO₂, ZrO₂, P₂O₅, or a combination thereof (see e.g., U.S. Pat. No. 10,974,990). In embodiments, the glass substrate is an alkaline earth boro-aluminosilicate glass substrate. In embodiments, the method includes immobilizing a plurality of tissue sections to the solid support (e.g., a flow cell), wherein a tissue in a plurality of tissue sections includes the biomolecule to be detected. In embodiments, the method includes immobilizing 24 tissue sections (10 mm×17 mm sections). In embodiments, the method includes immobilizing 40 tissue sections (10 mm×10 mm sections). In embodiments, the method includes immobilizing 128 tissue sections (4 m×4 m sections).

[0124] In embodiments, the solid support includes a polymer layer. In embodiments, the polymer layer includes polymerized units of alkoxysilyl methacrylate, alkoxysilyl acrylate, alkoxysilyl methylacrylamide, alkoxysilyl methylacrylamide, or a copolymer thereof. In embodiments, the polymer layer includes polymerized units of alkoxysilyl methacrylate. In embodiments, the polymer layer includes polymerized units of alkoxysilyl acrylate. In embodiments, the polymer layer includes polymerized units of alkoxysilyl methylacrylamide. In embodiments, the polymer layer includes polymerized units of alkoxysilyl methylacrylamide. In embodiments, the polymer layer includes glycidyloxypropyl-trimethyloxysilane. In embodiments, the polymer layer includes methacryloxypropyl-trimethoxysilane. In embodiments, the polymer layer includes polymerized units of

[chemical structure]

or a copolymer thereof. In embodiments, the polymer layer is an organically-modified ceramic polymer. In embodiments, the polymer includes polymerized monomers of alkoxysilyl polymers, such as

[chemical structure]

In embodiments, the solid support includes polymerized units of

[chemical structure]

In embodiments, the solid support includes polymerized units of

[chemical structure]

In embodiments, the solid support includes polymerized unites of

[chemical structure]

In embodiments, the polymer layer includes one or more ceramic particles, (e.g., silicates, aluminates, and titanates). In embodiments, the polymer layer includes tantalum(V) oxide, titanium dioxide, zinc oxide, and/or iron oxide.

[0125] In embodiments, the method includes immobilizing a plurality of tissue sections to the solid support (e.g., a flow cell), wherein a tissue in a plurality of tissue sections includes the biomolecule to be detected. In embodiments, the method includes immobilizing 24 tissue sections (10 mm×17 mm sections). In embodiments, the method includes immobilizing 40 tissue sections (10 mm×10 mm sections). In embodiments, the method includes immobilizing 128 tissue sections (4 m×4 m sections).

[0126] The cell or tissue may be manipulated prior to immobilizing the cell or tissue onto a solid support using known techniques in the art (see, e.g., PCT Publication WO2023076832A1). In embodiments, the method further includes cutting a sample portion from the biological sample (e.g., including cells or tissues) using a punch device such that the punch device contains the sample portion; mounting the punch device containing the sample portion onto the first solid support as described herein (e.g., inverting the punch device); pushing the sample portion out of the punch device using a piston, so that all or a portion thereof of the sample portion is positioned on the first solid support as described herein. In embodiments, the method further includes cutting a sample portion from the biological sample using two or more punch devices such that each punch device contains a different the sample portion; mounting each punch device containing the sample portion onto the first solid support as described herein; pushing the sample portions out of the punch devices using one or more pistons so that the sample portions are positioned onto the solid support as described herein (e.g., a flow cell described herein).

[0127] In embodiments, the method further includes permeabilizing the tissue or cell prior to binding the probe to the biomolecule. Methods for permeabilization are known in the art, as exemplified by Cremer et al., The Nucleus: Volume 1: Nuclei and Subnuclear Components, R. Hancock (ed.) 2008; and Larsson et al., Nat. Methods (2010) 7:395-397, the content of each of which is incorporated herein by reference in its entirety. In embodiments, the tissue and/or cell is cleared (e.g., digested) of proteins, lipids, or proteins and lipids. In embodiments, permeabilizing the tissue or cell does not release the biomolecules (e.g., the one or more biomolecules) from within the tissue or cell. For example, after a fixation process (e.g. formaldehyde cross-linking), proteins and nucleic acids are immobilized within the cells of a tissue section, and are therefore not liberated into the environment following permeabilization of the cells. In embodiments, permeabilizing includes contacting the sample (e.g., the cell or tissue) with a permeabilization agent. Suitable agents for this purpose include, but are not limited to, organic solvents (e.g., acetone, ethanol, and methanol), cross-linking agents (e.g., paraformaldehyde), detergents (e.g., saponin, Triton X100™, Tween-20™, or sodium dodecyl sulfate (SDS)), and enzymes (e.g., trypsin, proteases (e.g., proteinase K). In embodiments, the detergent is an anionic detergent (e.g., SDS or N-lauroylsarcosine sodium salt solution). In embodiments, the permeabilization agent includes polyethylene glycol (PEG). In embodiments, the PEG is from about PEG 2K to about PEG 16K. In some embodiments, the PEG is PEG 2K, 3K, 4K, 5K, 6K, 7K, 8K, 9K, 10K, 11K, 12K, 13K, 14K, or 16K. In embodiments, the PEG is present at a concentration from about 2% to 25%, from about 4% to about 23%, from about 6% to about 21%, or from about 8% to about 20% (v/v).

[0128] Imaging deep into a tissue volume is problematic due to inherently fluorescent molecules present in the tissue or introduced during processing which give rise to autofluorescence that masks fluorescently labelled structures of interest. Typically, autofluorescence decreases image quality by lowering the signal to noise ratio across multiple fluorescence channels and undermines sharp images. Autofluorescence may arise from endogenous fluorescent biomolecules (NADPH, collagen, flavins, tyrosine, and others) or be introduced by the formation of Schiffs bases during fixation with aldehydes (e.g., glutaraldehyde and paraformaldehyde). Additional light scattering is provided by various cellular components, such as ribosomes, nuclei, nucleoli, mitochondria, lipid droplets, membranes, myelin, cytoskeletal components, and extracellular matrix components such as collagen and elastin.

[0129] In embodiments, the tissue or cell is cleared using a solvent-based clearing approach. Solvent-based clearing techniques typically includes two steps: 1) dehydration (e.g., contacting the sample with methanol with or without hexane or, tetrahydrofuran (THF) alone) and 2) clearing by refractive index matching to the remaining dehydrated tissue's index (e.g., contacting the tissue sample with methyl salicylate, benzyl alcohol, benzyl benzoate, dichloromethane, or dibenzyl ether). Alternatively, the initial dehydration may be performed using phosphate buffered saline (PBS), detergent, and dimethyl sulfoxide (DMSO). In embodiments, the tissue is cleared by contacting the tissue sample with an aqueous solution containing sucrose, fructose, 2,2′-thiodiethanol (TDE), or formamide.

[0130] In embodiments, the tissue or cell is cleared utilizing the 3D imaging of solvent-cleared organs (3DISCO) method as described in ErtUrk Aet al. Nat Protoc. 2012 Nov. 7(11):1983-95, which is incorporated herein by reference. For example, a sample is incubated overnight in 50% v/v tetrahydrofuran/H₂O (THF), followed by incubation for at least one hour 80% THF/H₂O and followed by incubation in a 100% THF solution. This is then followed by contacting the sample with dichloromethane (DCM) and an incubation in dibenzyl ether (DBE) until clear.

[0131] In embodiments, the tissue or cell is cleared according to a known technique in the art, for example CLARITY (Chung K., et al. Nature 497, 332-337 (2013)), PACT-PARS (Yang Bet al. Cell 158, 945-958 (2014).), CUBIC (Susaki E. A. et al. Cell 157, 726-739 (2014), 18), ScaleS (Hama H., et al. Nat. Neurosci. 18, 1518-1529 (2015)), OPTIClear (Lai H. M., et al. Nat. Commun. 9, 1066 (2018)), Cₑ3D (Li W., et al. Proc. Natl. Acad. Sci. U.S.A. 114, E7321-E7330 (2017)), BABB (Dodt H. U. et al. Nat. Methods 4, 331-336 (2007)), iDISCO (Renier N., et al. Cell 159, 896-910 (2014)), uDISCO (Pan C., et al. Nat. Methods 13, 859-867 (2016)), FluoClearBABB (Schwarz M. K., et al. PLOS ONE 10, e0124650 (2015)), Ethanol-ECi (Klingberg A., et al. J. Am. Soc. Nephrol. 28, 452-459 (2017)), and PEGASOS (Jing D. et al. Cell Res. 28, 803-818 (2018)).

[0132] In embodiments, the tissue or cell is contacted with an alkaline solution containing a combination of 2,2′-thiodiethanol (TDE), DMSO, D-sorbitol, and Tris. In embodiments, the tissue section is contacted with an aqueous solution including 20% (vol/vol) DMSO, 40% (vol/vol) TDE, 20% (wt/vol) sorbitol, and 6% (wt/vol, equal to 0.5 M) Tris base. In embodiments, the tissue section is contacted with an aqueous solution including 25% (wt/wt) urea, 25% (wt/wt) N,N,N′,N′-Tetrakis (2-hydroxypropyl) ethylenediamine, and 15% (wt/wt) Triton X-100. In embodiments, the tissue section is contact with an aqueous solution including 9.1 M urea, 22.5% (wt/vol) D-sorbitol, and 5% (wt/vol) Triton X-100. In embodiments, the tissue section is contact with an aqueous solution including 30% (wt/vol) urea, 20% (wt/vol) D-sorbitol, and 5% (wt/vol) glycerol dissolved in DMSO. In embodiments, the tissue or cell is contacted with an aqueous solution according to the protocols described in Shan, Q H., Qin, X Y., Zhou, N. et al. BMC Biol 20, 77 (2022).

[0133] In embodiments, the method includes imaging the immobilized tissue section. In embodiments, the method further includes an imaging modality, immunofluorescence (IF), or immunohistochemistry modality (e.g., immunostaining). In embodiments, the method includes ER staining (e.g., contacting the tissue section with a cell-permeable dye which localizes to the endoplasmic reticula), Golgi staining (e.g., contacting the tissue section with a cell-permeable dye which localizes to the Golgi), F-actin staining (e.g., contacting the tissue section with a phalloidin-conjugated dye that binds to actin filaments), lysosomal staining (e.g., contacting the tissue section with a cell-permeable dye that accumulates in the lysosome via the lysosome pH gradient), mitochondrial staining (e.g., contacting the tissue section with a cell-permeable dye which localizes to the mitochondria), nucleolar staining, or plasma membrane staining. For example, the method includes live cell imaging (e.g., obtaining images of the tissue section) prior to or during fixing, immobilizing, and permeabilizing the tissue section. Immunohistochemistry (IHC) is a powerful technique that exploits the specific binding between an antibody and antigen to detect and localize specific antigens in cells and tissue, commonly detected and examined with the light microscope. Known IHC modalities may be used, such as the protocols described in Magaki, S., Hojat, S. A., Wei, B., So, A., & Yong, W. H. (2019). Methods in molecular biology (Clifton, N.J.), 1897, 289-298, which is incorporated herein by reference. In embodiments, the additional imaging modality includes bright field microscopy, phase contrast microscopy, Nomarski differential-interference-contrast microscopy, or dark field microscopy. In embodiments, the method further includes determining the cell morphology of the tissue section (e.g., the cell boundary or cell shape) using known methods in the art. For example, to determining the cell boundary includes comparing the pixel values of an image to a single intensity threshold, which may be determined quickly using histogram-based approaches as described in Carpenter, A. et al Genome Biology 7, R100 (2006) and Arce, S., Sci Rep 3, 2266 (2013)). By “microscopic analysis” is meant the analysis of a specimen using techniques that provide for the visualization of aspects of a specimen that cannot be seen with the unaided eye, i.e., that are not within the resolution range of the normal human eye. Such techniques may include, without limitation, optical microscopy, e.g., bright field, oblique illumination, dark field, phase contrast, differential interference contrast, interference reflection, epifluorescence, confocal microscopy, CLARITY-optimized light sheet microscopy (COLM), light field microscopy, tissue expansion microscopy, etc., laser microscopy, such as, two photon microscopy, electron microscopy, and scanning probe microscopy. By “preparing a biological specimen for microscopic analysis” is generally meant rendering the specimen suitable for microscopic analysis at an unlimited depth within the specimen. In embodiments, the immobilized tissue section is imaged using “optical sectioning” techniques, such as laser scanning confocal microscopes, laser scanning 2-Photon microscopy, parallelized confocal (i.e. spinning disk), computational image deconvolution methods, and light sheet approaches. Optical sectioning microscopy methods provide information about single planes of a volume by minimizing contributions from other parts of the volume and do so without physical sectioning. The resulting “stack” of such optically sectioned images, represents a full reconstruction of the 3-dimensional features of a tissue volume. A typical confocal microscope includes a 10×/0.5 objective (dry; working distance, 2.0 mm) and/or a 20×/0.8 objective (dry; working distance, 0.55 mm), with a z-step interval of 1 to 5 m. A typical light sheet fluorescence microscope includes an sCMOS camera, a 2×/0.5 objective lens, and zoom microscope body (magnification range of ×0.63 to ×6.3). For entire scanning of whole samples, the z-step interval is 5 or 10 m, and for image acquisition in the regions of interest, an interval in the range of 2 to 5 m may be used. In embodiments, the tissue sample is stained using immunofluorescence, immunohistochemistry, or hematoxylin and/or eosin (H&E) stain.

[0134] To microscopically visualize tissue sections prepared by the subject methods, in some embodiments the tissue section is embedded in a mounting medium. Mounting medium is typically selected based on its suitability for the reagents used to visualize the cellular biomolecules, the refractive index of the tissue section, and the microscopic analysis to be performed. For example, for phase-contrast work, the refractive index of the mounting medium should be different from the refractive index of the specimen, whereas for bright-field work the refractive indexes should be similar. As another example, for epifluorescence work, a mounting medium should be selected that reduces fading, photobleaching or quenching during microscopy or storage. In certain embodiments, a mounting medium or mounting solution may be selected to enhance or increase the optical clarity of the cleared tissue specimen. Nonlimiting examples of suitable mounting media that may be used include glycerol, CC/Mount™, Fluoromount™ Fluoroshield™, ImmunHistoMount™, Vectashield™, Permount™, Acrytol™, CureMount™ FocusClear™, or equivalents thereof.

[0135] The biological targets or molecules to be detected can be any biological molecules including but not limited to proteins, nucleic acids, lipids, carbohydrates, ions, or multicomponent complexes containing any of the above. Examples of subcellular targets include organelles, e.g., mitochondria, Golgi apparatus, endoplasmic reticulum, chloroplasts, endocytic vesicles, exocytic vesicles, vacuoles, lysosomes, etc. Exemplary nucleic acid targets can include genomic DNA of various conformations (e.g., A-DNA, B-DNA, Z-DNA), mitochondria DNA (mtDNA), mRNA, tRNA, rRNA, hRNA, miRNA, and piRNA. For example, following immobilization on the receiving substrate, the sections may be fixed with methanol, permeabilized with 0.025% Triton in PBS solution, and stained with primary antibodies directed against vimentin (fibroblasts) and macrophages, followed by secondary antibody labeling (e.g., Alexa-594 conjugated secondary antibodies). Additional counterstaining may be performed, for example using 4,6-diamidino-2-phenylindole (DAPI) mounting media to counterstain nuclei.

[0136] In an aspect is provided a method of imaging a cell or tissue. In embodiments, the method includes: contacting a cell or tissue with a first probe set, wherein the first probe set includes a plurality of probes as described herein; binding each probe to a different target of the cell or tissue; imaging (e.g., obtaining an image) the cell or tissue; contacting the cell or tissue with a second probe set, wherein the second probe set includes a plurality of probes as described herein; binding each probe to a different target of the cell or tissue; and imaging (e.g., obtaining an image) the cell or tissue.

[0137] In embodiments, amplifying the circular polynucleotide generates an amplification product including multiple copies of the target sequence, or a complement thereof. In embodiments, the method includes serially cycling through detection cycles to determine the sequence (e.g., the order of the nucleotides) of the target sequence), wherein each detection cycle includes hybridizing, detecting, and removing a fluorescently labelled oligonucleotide. In embodiments, detecting includes sequencing the amplification product (e.g., using a sequencing by synthesis or sequencing by binding process).

[0138] In embodiments, forming the circular polynucleotide includes ligating a first end and a second end of the oligonucleotide probe together. In embodiments, ligating includes forming a covalent bond from the first end and the second end. As those of skill in the art appreciate, two nucleotide sequences that that are to ligated together will generally directly abut one another.

[0139] In embodiments, the method includes contacting a cell or tissue with a polynucleotide probe and hybridizing a first hybridization sequence of the polynucleotide probe to a first target sequence of the RNA or DNA molecule, and hybridizing a second hybridization sequence of the polynucleotide probe to a second target sequence of the RNA or DNA molecule, ligating the first hybridization sequence and the second hybridization sequence together thereby forming a circular oligonucleotide; extending an amplification primer hybridized to the circular oligonucleotide with a polymerase to generate an extension product comprising the target sequence; and hybridizing a sequencing primer to the extension product and sequencing the target sequence (i.e., the first and/or second hybridization sequence) in the cell or tissue, thereby detecting the RNA or DNA molecule. In embodiments, the nucleic acid molecule is cDNA. In embodiments, the nucleic acid molecule is DNA. In embodiments, the nucleic acid molecule is RNA. In embodiments, the target is an RNA nucleic acid sequence or DNA nucleic acid sequence. In embodiments, the target is an RNA nucleic acid sequence or DNA nucleic acid sequence from the same cell. In embodiments, the target is an RNA nucleic acid sequence. In embodiments, the RNA nucleic acid sequence is stabilized using known techniques in the art. For example, RNA degradation by RNase should be minimized using commercially available solutions, e.g., RNA Later®, RNA Lysis Buffer, or Keratinocyte serum-free medium). In embodiments, the target is messenger RNA (mRNA), transfer RNA (tRNA), micro RNA (miRNA), small interfering RNA (siRNA), small nucleolar RNA (snoRNA), small nuclear RNA (snRNA), Piwi-interacting RNA (piRNA), enhancer RNA (eRNA), or ribosomal RNA (rRNA). In embodiments, the target is pre-mRNA. In embodiments, the target is heterogeneous nuclear RNA (hnRNA). In embodiments, the target is mRNA, tRNA (transfer RNA), rRNA (ribosomal RNA), or noncoding RNA (such as lncRNA (long noncoding RNA)). In embodiments, the targets are on different regions of the same RNA nucleic acid sequence. In embodiments, the targets are cDNA target nucleic acid sequences and before step i), the RNA nucleic acid sequences are reverse transcribed to generate the cDNA target nucleic acid sequences. In embodiments, reverse transcription of the RNA nucleic acid is performed with a reverse transcriptase, for example, Tth DNA polymerase or mutants thereof. In embodiments, the targets are not reverse transcribed to cDNA, i.e., the oligonucleotide primer is hybridized directly to the target nucleic acid.

[0140] In embodiments the target is an RNA transcript. In embodiments the target is a single stranded RNA nucleic acid sequence. In embodiments, the target is an RNA nucleic acid sequence or a DNA nucleic acid sequence (e.g., cDNA). In embodiments, the target is a cDNA target nucleic acid sequence and before step i), the RNA nucleic acid sequence is reverse transcribed to generate the cDNA target nucleic acid sequence. In embodiments, reverse transcription of the RNA nucleic acid is performed with a reverse transcriptase, for example, Tth DNA polymerase or mutants thereof. In embodiments, the target is genomic DNA (gDNA), mitochondrial DNA, chloroplast DNA, episomal DNA, viral DNA, or copy DNA (cDNA). In embodiments, the target is coding RNA such as messenger RNA (mRNA), and non-coding RNA (ncRNA) such as transfer RNA (tRNA), microRNA (miRNA), small nuclear RNA (snRNA), or ribosomal RNA (rRNA). In embodiments, the target is a cancer-associated gene. In embodiments, to minimize amplification errors or bias, the target is not reverse transcribed to generate cDNA.

[0141] In embodiments, the polynucleotide probe includes DNA. In embodiments, the polynucleotide probe consists of DNA. In embodiments, the polynucleotide probe is a single-stranded polynucleotide comprising at least one amplification primer binding sequence, at least one sequencing primer binding sequence, or both one amplification primer binding sequence and one sequencing primer binding sequence. In embodiments, the first hybridization sequence, the second hybridization sequence, or both the first and second hybridization sequences of the polynucleotide probe comprise one or more locked nucleic acid (LNA) nucleotides. In embodiments, an amplification primer and a sequencing primer are complementary to different primer binding sequences. In embodiments, the primer binding sequence is complementary to a fluorescent in situ hybridization (FISH) probe. FISH probes may be custom designed using known techniques in the art, see for example Gelali, E., Girelli, G., Matsumoto, M. et al. Nat Commun 10, 1636 (2019).

[0142] In embodiments, the method includes circularizing and ligating the complementary sequence to the 5′ end of the polynucleotide probe. In embodiments, circularizing the oligonucleotide primer to generate a circular oligonucleotide includes extending the 3′ end of the oligonucleotide primer (e.g., extending the 3′ end of the primer using a polymerase (e.g., a Thermus thermophilus (Tth) DNA polymerase) to incorporate one or more nucleotides) along the target nucleic acid to generate a complementary sequence (e.g., complementary to the target nucleic acid, for example a target RNA sequence), and ligating the complementary sequence to the 5′ end of the oligonucleotide primer. In embodiments, the ligation includes enzymatic ligation. In embodiments, ligating includes enzymatic ligation including a ligation enzyme (e.g., Circligase enzyme, Taq DNA Ligase, HiFi Taq DNA Ligase, T4 ligase, PBCV-1 DNA Ligase (also known as SplintR® ligase) or Ampligase DNA Ligase). Non-limiting examples of ligases include DNA ligases such as DNA Ligase I, DNA Ligase II, DNA Ligase III, DNA Ligase IV, T4 DNA ligase, T7 DNA ligase, T3 DNA Ligase, E. coli DNA Ligase, PBCV-1 DNA Ligase (also known as SplintR ligase) or a Taq DNA Ligase. In embodiments, the ligase enzyme includes a T4 DNA ligase, T4 RNA ligase 1, T4 RNA ligase 2, T3 DNA ligase or T7 DNA ligase. In embodiments, the enzymatic ligation is performed by a mixture of ligases. In embodiments, the ligation enzyme is selected from the group consisting of T4 DNA ligase, T4 RNA ligase 1, T4 RNA ligase 2, RtcB ligase, T3 DNA ligase, T7 DNA ligase, Taq DNA ligase, PBCV-1 DNA Ligase, a thermostable DNA ligase (e.g., 5′AppDNA/RNA ligase), an ATP dependent DNA ligase, an RNA-dependent DNA ligase (e.g., SplintR ligase), and combinations thereof.

[0143] In embodiments, amplifying the circular polynucleotide includes hybridizing a primer to the circular polynucleotide and extending the primer with a strand-displacing polymerase. In embodiments, the method further includes amplifying the circular oligonucleotide by extending an amplification primer with a polymerase (e.g., a strand-displacing polymerase), wherein the primer extension generates an extension product including multiple complements of the circular oligonucleotide, referred to as an amplicon. An amplicon typically contains multiple, tandem copies of the circularized nucleic acid molecule of the corresponding sample nucleic acid. The number of copies can be varied by appropriate modification of the reaction conditions, such as varying the number of amplification cycles, using polymerases of varying processivity in the amplification reaction, or varying the length of time that the amplification reaction is run. In embodiments, the extension product includes three or more copies of the circular oligonucleotide. In embodiments, the circular oligonucleotide is copied about 3-50 times (i.e., the extension product includes about 3 to 50 complements of the circular oligonucleotide). In embodiments, the circular oligonucleotide is copied about 50-100 times (i.e., the extension product includes about 50 to 100 complements of the circular oligonucleotide). In embodiments, the circular oligonucleotide is copied about 100-300 times (i.e., the extension product includes about 100 to 300 complements of the circular oligonucleotide). In embodiments, the method includes hybridizing an amplification primer and oligonucleotide primer in the same reaction (e.g., simultaneously). In embodiments, the oligonucleotide is extended as an amplification primer after generating the circular oligonucleotide (e.g., the 3′ end of the oligonucleotide hybridized to the circular oligonucleotide is extended with a polymerase). In embodiments, the method includes contacting the target with an amplification primer and oligonucleotide primer in the same reaction (e.g., simultaneously). In embodiments, the method includes fixing the amplification products (e.g., contacting the amplification product with formalin). In embodiments, amplifying includes incubating the circular polynucleotide with a strand-displacing polymerase for about 15 minutes to about 2 hours. In embodiments, amplifying includes incubating the circular polynucleotide with a strand-displacing polymerase for about 30 minutes to about 60 minutes. In embodiments, amplifying includes binding an amplification primer to the primer binding sequence and extending the amplification primer with a strand-displacing polymerase.

[0144] In embodiments, sequencing includes hybridizing a sequencing primer to the amplification product and incorporating one or more labeled nucleotides, and detecting the incorporated one or more labeled nucleotides so as to identify the sequence.

[0145] In embodiments, the method includes sequencing the extension products, which includes the target nucleic acid sequence. A variety of sequencing methodologies can be used such as sequencing-by synthesis (SBS), pyrosequencing, sequencing by ligation (SBL), or sequencing by hybridization (SBH). Pyrosequencing detects the release of inorganic pyrophosphate (PPi) as particular nucleotides are incorporated into a nascent nucleic acid strand (Ronaghi, et al., Analytical Biochemistry 242(1), 84-9 (1996); Ronaghi, Genome Res. 11(1), 3-11 (2001); Ronaghi et al. Science 281(5375), 363 (1998); U.S. Pat. Nos. 6,210,891; 6,258,568; and. 6,274,320, each of which is incorporated herein by reference in its entirety). In pyrosequencing, released PPi can be detected by being converted to adenosine triphosphate (ATP) by ATP sulfurylase, and the level of ATP generated can be detected via light produced by luciferase. In this manner, the sequencing reaction can be monitored via a luminescence detection system. In both SBL and SBH methods, target nucleic acids, and amplicons thereof, are subjected to repeated cycles of oligonucleotide delivery and detection. SBL methods, include those described in Shendure et al. Science 309:1728-1732 (2005); U.S. Pat. Nos. 5,599,675; and 5,750,341, each of which is incorporated herein by reference in its entirety; and the SBH methodologies are as described in Bains et al., Journal of Theoretical Biology 135(3), 303-7 (1988); Drmanac et al., Nature Biotechnology 16, 54-58 (1998); Fodor et al., Science 251(4995), 767-773 (1995); and WO 1989/10977, each of which is incorporated herein by reference in its entirety.

[0146] In SBS, extension of a nucleic acid primer along a nucleic acid template is monitored to determine the sequence of nucleotides in the template. The underlying chemical process can be catalyzed by a polymerase, wherein fluorescently labeled nucleotides are added to a primer (thereby extending the primer) in a template dependent fashion such that detection of the order and type of nucleotides added to the primer can be used to determine the sequence of the template. In embodiments, sequencing includes annealing and extending a sequencing primer to incorporate a detectable label that indicates the identity of a nucleotide in the target polynucleotide, detecting the detectable label, and repeating the extending and detecting of steps. In embodiments, the methods include sequencing one or more bases of a target nucleic acid by extending a sequencing primer hybridized to a target nucleic acid (e.g., an amplification product produced by the amplification methods described herein). In embodiments, sequencing may be accomplished by a sequencing-by-synthesis (SBS) process. In embodiments, sequencing includes a sequencing by synthesis process, where individual nucleotides are identified iteratively, as they are polymerized to form a growing complementary strand. In embodiments, nucleotides added to a growing complementary strand include both a label and a reversible chain terminator that prevents further extension, such that the nucleotide may be identified by the label before removing the terminator to add and identify a further nucleotide. Such reversible chain terminators include removable 3′ blocking groups, for example as described in U.S. Pat. Nos. 7,541,444 and 7,057,026. Once such a modified nucleotide has been incorporated into the growing polynucleotide chain complementary to the region of the template being sequenced, there is no free 3′-OH group available to direct further sequence extension and therefore the polymerase cannot add further nucleotides. Once the identity of the base incorporated into the growing chain has been determined, the 3′ reversible terminator may be removed to allow addition of the next successive nucleotide. By ordering the products derived using these modified nucleotides it is possible to deduce the DNA sequence of the oligonucleotide target nucleic acid sequence.

[0147] In embodiments, sequencing includes sequentially extending a plurality of sequencing primers (e.g., sequencing a first region of a target nucleic acid followed by sequencing a second region of a target nucleic acid, followed by sequencing N regions, where N is the number of sequencing primers in the known sequencing primer set). In embodiments, sequencing includes generating a plurality of sequencing reads.

[0148] In embodiments, the method includes sequencing the amplification products (e.g., a plurality of different amplification products). In embodiments, sequencing includes a plurality of sequencing cycles. In embodiments, sequencing includes a plurality of rounds of sequencing cycles (e.g., a first round of 10 sequencing cycles; followed by a second round of 10 sequencing cycles). In embodiments, sequencing includes a plurality of rounds of sequencing cycles (e.g., a first round of 1 sequencing cycle; followed by a second round of 1 sequencing cycle). In embodiments, sequencing includes 20 to 100 sequencing cycles. In embodiments, sequencing includes 50 to 100 sequencing cycles. In embodiments, sequencing includes 50 to 300 sequencing cycles. In embodiments, sequencing includes 50 to 150 sequencing cycles. In embodiments, sequencing includes at least 10, 20, 30 40, or 50 sequencing cycles. In embodiments, sequencing includes at least 10 sequencing cycles. In embodiments, sequencing includes 10 to 20 sequencing cycles. In embodiments, sequencing includes 10, 11, 12, 13, 14, or 15 sequencing cycles. In embodiments, sequencing includes (a) extending a sequencing primer by incorporating a labeled nucleotide, or labeled nucleotide analogue and (b) detecting the label to generate a signal for each incorporated nucleotide or nucleotide analogue. In embodiments, prior to initiating a next round of sequencing cycles, the first sequencing primer is terminated or removed. For example, termination may occur via incorporating a non-extendable nucleotide (e.g., a ddNTP or acyclic nucleotide) into the first sequencing primer.

[0149] In embodiments, sequencing includes sequentially sequencing a plurality of different targets by initiating sequencing with different sequencing primers. For example, a first circularizable probe includes a first primer binding site (a nucleic acid sequence complementary to a first sequencing primer) and optionally a first barcode sequence or barcode nucleotide. In a similar manner, a second and third padlock probe include a second primer binding site (a nucleic acid sequence complementary to a second, different, sequencing primer) and a third primer binding site (a nucleic acid sequence complementary to a third, different from both Primer 1 and Primer 2, sequencing primer), respectively. During the first round of sequencing (following probe circularization and amplification according to the methods described herein), using primer 1, the probe hybridized to the first nucleic acid molecule is detected. In the second round of sequencing, primer 2 can hybridize and sequence an identifying sequence of the probe (e.g., a barcode sequence or nucleotide) hybridized to a second nucleic acid molecule. Similarly, in the third round of sequencing, primer 3 can hybridize and sequence the probe hybridized to the third nucleic acid molecule. In embodiments, each oligonucleotide probe further includes a barcode sequence. In embodiments, the barcode (i.e., the barcode sequence) is at least 5, 6, 7, 8, 9, 10, 11, 12, 13, 14, or 15 nucleotides in length. In embodiments, the barcode is 5, 6, 7, 8, 9, 10, 11, 12, 13, 14, or 15 nucleotides in length. In embodiments, the barcode is 10 to 15 nucleotides in length. In embodiments, the barcode is at least about 1, 2, 3, 4, 5, 6, 7, 8, 9, 10, 15, 20, 25, 30, 35, 40, 45, 50 or more nucleotides in length. In embodiments, the barcode can be at most about 300, 200, 100, 90, 80, 70, 60, 50, 40, 30, 20, 15, 12, 10, 9, 8, 7, 6, 5, 4 or fewer or more nucleotides in length. In embodiments, the barcode includes between about 5 to about 8, about 5 to about 10, about 5 to about 15, about 5 to about 20, about 10 to about 150 nucleotides. In embodiments, the barcode includes between 5 to 8, 5 to 10, 5 to 15, 5 to 20, 10 to 150 nucleotides. In embodiments, the barcode is 10 nucleotides. In embodiments, the barcode may include a unique sequence (e.g., a barcode sequence) that gives the barcode its identifying functionality. The unique sequence may be random or non-random. The random sequence can be of any suitable length, and there may be one or more than one present. As non-limiting examples, the random sequence may have a length of 10 to 40, 10 to 30, 10 to 20, 25 to 50, 15 to 40, 15 to 30, 20 to 50, 20 to 40, or 20 to 30 nucleotides.

[0150] In embodiments, sequencing includes encoding the sequencing read into a codeword. Useful encoding schemes include those developed for telecommunications, coding theory and information theory such as those set forth in Hamming, Coding and Information Theory, 2^{nd} Ed. Prentice Hall, Englewood Cliffs, N.J. (1986) and Moon TK. Error Correction Coding: Mathematical Methods and Algorithms. ed. 1st Wiley: 2005, each of which are incorporated herein by reference. A useful encoding scheme uses a Hamming code. A Hamming code can provide for signal (and therefore sequencing and barcode) distinction. In this scheme, signal states detected from a series of nucleotide incorporation and detection events (i.e., while sequencing the oligonucleotide barcode) can be represented as a series of the digits to form a codeword, the codeword having a length equivalent to the number incorporation/detection events. The digits can be binary (e.g. having a value of 1 for presence of signal and a value of 0 for absence of the signal) or digits can have a higher radix (e.g., a ternary digit having a value of 1 for fluorescence at a first wavelength, a value of 2 for fluorescence at a second wavelength, and a value of 0 for no fluorescence at those wavelengths, etc.). Barcode discrimination capabilities are provided when codewords can be quantified via Hamming distances between two codewords (i.e., barcode 1 having codeword 1, and barcode 2 having codeword 2, etc.).

[0151] In embodiments, generating a sequencing read includes determining the identity of the nucleotides in the template polynucleotide (or complement thereof). In embodiments, a sequencing read, e.g., a first sequencing read or a second sequencing read, includes determining the identity of a portion (e.g., 1, 2, 5, 10, 20, 50 nucleotides) of the total template polynucleotide. In embodiments the first sequencing read determines the identity of 5-10 nucleotides and the second sequencing read determines the identity of more than 5-10 nucleotides (e.g., 11 to 200 nucleotides). In embodiments the first sequencing read determines the identity of more than 5-10 nucleotides (e.g., 11 to 200 nucleotides) and the second sequencing read determines the identity of 5-10 nucleotides. In embodiments, following the generation of a sequencing read, subsequent extension is performed using a plurality of standard (e.g., non-modified) dNTPs until the complementary strand is copied. In other embodiments, following the generation of a sequencing read, subsequent extension is performed using a plurality of dideoxy nucleotide triphosphates (ddNTPs) or acyclic nucleotide triphosphates to prevent further extension of the first sequencing read product during a second sequencing read. In embodiments, following the identification of at least 5-10 (e.g., 11 to 200 nucleotides, or up to 1000 nucleotides), subsequent extension is performed using a plurality of standard (e.g., non-modified) dNTPs until the complementary strand is copied. In embodiments, following the identification of at least 5-10 (e.g., 11 to 200 nucleotides, or up to 1000 nucleotides), subsequent extension is performed using a plurality of dideoxy nucleotide triphosphates (ddNTPs) or acyclic nucleotide triphosphates to prevent further extension of the sequencing read product.

[0152] In embodiments, sequencing includes sequencing by synthesis, sequencing by binding, or sequencing by ligation. In embodiments, sequencing includes extending a sequencing primer by incorporating a labeled nucleotide or labeled nucleotide analogue, and detecting the label to generate a signal for each incorporated nucleotide or nucleotide analogue, wherein the sequencing primer is hybridized to the amplification product. In embodiments, the sequencing primer includes the sequence: SEQ ID NO:11419, SEQ ID NO:11420, SEQ ID NO:11421, SEQ ID NO:11422, SEQ ID NO:11423, SEQ ID NO:11424, SEQ ID NO:11425, or SEQ ID NO:11426.

[0153] In embodiments, the method further includes determining the cell morphology (e.g., the cell boundary or cell shape). Cells within a tissue have differences in cell morphology and/or function due to varied analyte levels (e.g., gene and/or protein expression) within the different cells. The specific position of a cell within a tissue (e.g., the cell's position relative to neighboring cells or the cell's position relative to the tissue microenvironment) can affect, e.g., the cell's morphology, differentiation, fate, viability, proliferation, behavior, signaling, and cross-talk with other cells in the tissue. For example, to determining the cell boundary includes comparing the pixel values of an image to a single intensity threshold, which may be determined quickly using histogram-based approaches as described in Carpenter, A. et al Genome Biology 7, R100 (2006) and Arce, S., Sci Rep 3, 2266 (2013)).

[0154] In embodiments, the cell or tissue is stained (e.g., contacted and/or incubated with a stain agent). Non-limiting examples of stains include histological stains (e.g., hematoxylin and/or eosin) and immunological stains (e.g., fluorescent stains). A stain is a chemical agent used to selectively color components of biological tissues or cells to enhance their visibility under a microscope. Stains typically bind to specific cellular structures or organelles, such as proteins, nucleic acids, lipids, or carbohydrates, allowing for the differentiation and identification of these structures. In embodiments, the stain is a fluorescent stain (e.g., an intrinsic stain). Intrinsic or fluorescent stains are chemical compounds that possess the inherent ability to emit fluorescence when exposed to specific wavelengths of light, thereby enabling the visualization of biological structures without the need for additional staining agents; examples include eosin, which absorbs light in the blue-green part of the spectrum (around 490-520 nm) and emits light in the green-yellow part of the spectrum (around 520-550 nm), and Hoechst stains, which bind to DNA and emit blue fluorescence around 461 nm. In embodiments, detecting includes directing an excitation light to the cell or tissue and detecting an emission light from the first fluorescent dye. In embodiments, detecting includes directing an excitation light to the cell or tissue and detecting an emission light from the second fluorescent dye. In embodiments, detecting includes directing an excitation light to the cell or tissue and detecting an emission light from the stain. In embodiments, detecting includes directing an excitation light to the cell or tissue and detecting an emission light from the first fluorescent dye, the second fluorescent dye, and the stain. In embodiments, a cell or tissue can be imaged. In embodiments, the method includes detecting an organelle.

[0155] In an aspect is provided a method of detecting a biomolecule in or on a cell or tissue. In embodiments, the method includes immobilizing a cell or tissue including a biomolecule to a solid support; contacting the biomolecule in or on the cell or tissue with an oligonucleotide as described herein, binding a detection agent (e.g., a probe) including a label to the probe oligonucleotide (or an amplification product thereof); detecting the label, thereby detecting the biomolecule. In embodiments, the method includes imaging the tissue section. In embodiments, the detection agent is a biomolecule-specific binding agent. In embodiments, the biomolecule-specific binding agent is a protein-specific binding agent. In embodiments, the biomolecule-specific binding agent is an oligonucleotide-specific binding agent. In embodiments, the biomolecule-specific binding agent is capable of binding to a cluster of differentiation (CD) marker, integrin, selectin, cadherin, cytokine receptor, chemokine receptor, Toll-like receptor (TLR), ion channel, transmembrane protein, lipoprotein, glycoprotein, cell surface protein, transport protein, intracellular organelle, or transcription factor. In embodiments, the intracellular organelle includes actin, carbohydrate, centrosomes and centrioles, chloroplasts (in plant cells and some protists), cytoskeleton, endoplasmic reticulum, endosome, Golgi apparatus, intermediate filaments, lysosome, microfilaments, microtubules, mitochondria, nuclear envelope, nuclear pores, nucleoid, nucleolus, nucleus, peroxisome, phosphatidylserine, plasma membrane, ribosomes, rough endoplasmic reticulum, smooth endoplasmic reticulum, transferrin receptor, transport vesicles, and/or vacuoles. In embodiments, the biomolecule specific binding agent is capable of binding to a biomolecule in the mitogen-activated protein kinase (MAPK) pathway, PI3K/AKT/mTOR pathway, Wnt/β-catenin pathway, intrinsic (mitochondrial) pathway, extrinsic (death receptor) pathway, caspase cascade, Notch signaling pathway, hedgehog signaling pathway, TGF-β (transforming growth factor Beta) pathway, JAK/STAT pathway, G-protein coupled receptor (GPCR) pathway, calcium signaling pathway, glycolysis, citric acid cycle (Krebs Cycle), oxidative phosphorylation, lipid metabolism pathway, amino acid metabolism, Toll-like receptor (TLR) pathway, NF-κB signaling pathway, complement pathway, nucleotide excision repair (NER), base excision repair (BER), mismatch repair (MMR), cyclin-dependent kinase (CDK) pathway, Rb (retinoblastoma) pathway, p53 pathway, unfolded protein response (UPR), heat shock response pathway, oxidative stress pathway, BMP (bone morphogenetic protein) pathway, FGF (fibroblast growth factor) pathway, Sonic Hedgehog pathway, neurotrophin signaling pathway, synaptic transmission pathway, axon guidance pathways, insulin signaling pathway, thyroid hormone pathway, steroid hormone pathway, VEGF (vascular endothelial growth factor) pathway, DNA methylation pathway, histone modification pathway, or angiogenesis. In embodiments, the biomolecule specific binding agent is capable of binding to a biomolecule on the surface of or in a B cell, Mature B Cell, Follicular B cell, Marginal Zone B cell, Short lived plasma cell, Memory B cell, Long lived plasma cell, B1 cell, Breg, Germinal Center B cell, Macrophage, Monocyte, M1 macrophage, M2 macrophage, Dendritic Cell, Plasmacytoid dendritic cell, Monocyte-derived dendritic cell, T cell, T Follicular Helper, Th1, Th2, Th9, Th17, Th22, Treg, platelet (activated), platelet (rested), natural killer cell, neutrophil, basophil, eosinophil, mast cell, astrocyte, neuron, glial cell, lymphocyte, myeloid cell, granulocytes, neural cells, stem cells, endothelial cells, epithelial cells, mesenchymal stem cell, hematopoietic stem cell, embryonic stem, stromal cell, erythrocyte, fibroblast, or apoptotic cell.

[0156] In embodiments, the detection agent is an oligonucleotide-specific binding agent capable of hybridizing to a target oligonucleotide sequence in a tissue section. In embodiments, the detection agent is an oligonucleotide. In embodiments, the detection agent is an oligonucleotide, wherein the oligonucleotide includes: a) a first region at a 3′ end that is hybridized to a first complementary region of the polynucleotide, and b) a second region at a 5′ end that is hybridized to a second complementary region of the polynucleotide, wherein the second complementary region is 5′ with respect to the first complementary region. In embodiments, the method includes i) circularizing the oligonucleotide agent to generate a circular oligonucleotide and ligating the oligonucleotide-specific binding agent; ii) amplifying the circular oligonucleotide by extending an amplification primer hybridized to the circular oligonucleotide with a strand-displacing polymerase, wherein the amplification primer extension generates an extension product including multiple complements of the circular oligonucleotide; and iii) sequencing the extension product of step (ii). In embodiments, circularizing the oligonucleotide-specific binding agent includes extending the 3′ end of the oligonucleotide-specific binding agent (using a polymerase to incorporate one or more nucleotides) along the target nucleic acid to generate a complementary sequence and ligating the extended 3′ end of the oligonucleotide-specific binding agent to the 5′ end of the oligonucleotide-specific binding agent. In embodiments, the circular oligonucleotide includes a barcode sequence. In embodiments, circularizing in step i) further includes extending the 3′ end of the oligonucleotide primer (e.g., extending the 3′ end of the primer using a polymerase (e.g., a Thermus thermophilus (Tth) DNA polymerase) to incorporate one or more nucleotides) along the target nucleic acid to generate a complementary sequence (e.g., complementary to the target nucleic acid, for example a target RNA sequence) prior to ligating the complementary sequence to the 5′ end of the oligonucleotide primer. In embodiments, the oligonucleotide is an oligonucleotide primer.

[0157] In another aspect is provided a computer-implemented method designing an oligonucleotide probe for a target gene. In embodiments, the method includes generating, by a processor, a plurality of probe sequences. In embodiments, each probe sequence including a first segment and a second segment, each segment including computationally derived characters corresponding to 15 to 20 nucleotides; selecting from the plurality a first subset of probe sequences wherein each segment is complementary to a sequence of the target gene; and selecting, from the first subset, a second subset of probe sequences including: 45% to 65% guanine and/or cytosine nucleotides; no more than four consecutive guanine or cytosine nucleotides; and a predicted melting temperature of greater than 50° C. when forming a duplex with the sequence of the target gene.

[0158] The oligonucleotide probes can also be ranked or selected in the methods based on any mathematical combination of two or more nucleotide identities. For example, and not by way of limitation, probes can be ranked and/or selected based on the percentage or fraction of bases that are either guanine or cytosine (“G+C %”) or, alternatively, based on the percentage or fraction of bases that are either adenine or thymine (“A+T”). In another embodiment, oligonucleotide probes can be ranked or selected according to a differential between the percent or fraction of two or more nucleotide identities, such as the difference between the percent or fraction of bases in a probe that are adenine and the percent or fraction of bases that are cytosine (“A<C %”). In embodiments, oligonucleotide probes are ranked and/or selected to retain the number of G and C bases within a preferred range of 40% to 70% of the binding sequence. In particular, it is already well known in the art that guanine-cytosine base pairs have a higher stability than do adenine-thymine base pairs and, further, that many guanine containing mismatches have a higher stability than do non-guanine containing mismatches (see, e.g., SantaLucia, 1998, Proc. Natl. Acad. Sci. U.S.A. 95:1460-1465). As a result, although the percentage of guanine-cytosine base pairs is therefore somewhat correlated with the perfect match duplex binding energy discussed above, high number of guanine-cytosine base pairs are also correlated with higher levels of cross-hybridization. Preferably the percentage of G-C base pairs is between 0 and 75%, more preferably between 0 and 55%, and still more preferably between 8 and 45%.

[0159] In embodiments, the method includes removing from the first subset any probe sequence including a region complementary to a sequence in a transcriptome database. In embodiments, a homology search method such as BLAST (“Basic Local Alignment Search Tool”) and PowerBLAST (see, in particular, Altschul et al., 1990, J. Mol. Biol. 215:403-410; Altschul, 1997, Nucleic Acids Res. 25:3389-3402; and Zhang and Madden, 1997, Genome Res. 7:649-656) are performed against each probe sequence to identify polynucleotides, e.g., in a database of expressed sequences such as the GenBank or the dbEST database, which comprises sequences that are most identical or homologous to each probe's complementary sequence. For example, in embodiments, sequences which are at least 50%, 60%, 70%, 80%, 90%, 95%, or 99% identical to a probe's target sequence are identified using a search algorithm such as BLAST or PowerBLAST according to its default parameters. Preferably the search algorithm is employed using parameters set to detect perfect-match sequences of a seed length of, e.g., 7 to 15 or, more preferably, 7 to 12 bases. Binding energies and binding specificity are then evaluated only for polynucleotide sequences identified in such searches. Any probe sequences that have a match identified in a database may then be discarded.

[0160] In embodiments, the sequence of the target gene includes an exon. An exon is a contiguous nucleotide sequence within a gene that is transcribed into precursor messenger RNA (pre-mRNA) and retained following RNA splicing to form mature messenger RNA (mRNA). Exons encode amino acid sequences in protein-coding genes and represent functional units of genetic information that are typically translated into polypeptides. In the context of oligonucleotide probe design, exons are preferred target regions due to their biological relevance, transcriptional stability, and conserved expression across cells and tissues. Targeting exonic sequences enables the detection of expressed gene products and allows for transcript-specific discrimination in applications such as multiplexed gene expression profiling, spatial transcriptomics, and in situ hybridization. In embodiments, candidate probe sequences are computationally tiled across one or more exons of the target gene to ensure complete coverage. The first and second segments of each probe are selected from adjacent or nearby regions within a single exon or across exon-exon junctions, depending on the assay design. By focusing on exonic regions, the resulting probe set is optimized for hybridization to transcribed mRNA while minimizing background signal from intronic or intergenic regions.

[0161] In embodiments, each probe sequence includes a sequence overlap of less than eight nucleotides between the first segment and the second segment of the same probe sequence. The first and second segments correspond to the two hybridization arms of a circularizable oligonucleotide probe (see, for example FIG. 1). Limiting the overlap between these segments ensures that each segment binds to a distinct region of the target sequence, thereby preserving the specificity of hybridization. Overlap of greater than or equal to eight nucleotides may result in undesirable intra-molecular interactions, such as the formation of secondary structures or partial self-annealing, which may interfere with the hybridization, ligation, or amplification steps of the assay. The restriction on segment overlap reduces the likelihood of internal complementarity that could compromise probe performance, and facilitates the design of structurally stable probes suitable for multiplexed applications. In embodiments, the overlap constraint is applied during the computational design process and serves as an exclusion criterion when selecting candidate probes. The constraint supports the generation of probe sequences that retain structural distinction between their hybridization arms and minimizes sequence redundancy within each probe. In embodiments, the method includes removing any probe sequence that overlaps with another probe sequence in the second subset.

[0162] In embodiments, the method includes (a) identifying, for each probe sequence in the second subset, one or more off-target alignments, wherein an off-target alignment is a genomic or transcriptomic sequence that aligns with the probe sequence such that at least three contiguous nucleotides align to each of the first and second segments of the probe sequence; and (b) removing from the second subset any probe sequence including a predicted melting temperature of less than or equal to 42° C. when hybridized to any such off-target alignment. In embodiments, the method includes removing from the second subset any probe sequence including a predicted melting temperature of less than or equal to 40° C. (e.g., when bound to an off target).

[0163] In embodiments, the method includes (a) comparing, for each of the first and second segments of the probe sequences in the second subset, a Hamming distance to the corresponding segment of all other probe sequences in the second subset; and (b) filtering out any probe sequence in which either the first or second segment has a Hamming distance of less than three compared to any other corresponding segment in the second subset. In embodiments, the Hamming distance is 3. In embodiments, the Hamming distance is 2. In embodiments, the Hamming distance is 4. In embodiments, the Hamming distance is 5. In embodiments, the Hamming distance is 1.

### IV. Systems and Devices

[0164] In another aspect is provided a non-transitory computer-readable medium storing instructions that, when executed by a processor, perform a method as described herein. For example, the method includes (a) identifying, for each probe sequence in the second subset, one or more off-target alignments, wherein an off-target alignment is a genomic or transcriptomic sequence that aligns with the probe sequence such that at least three contiguous nucleotides align to each of the first and second segments of the probe sequence; and (b) removing from the second subset any probe sequence including a predicted melting temperature of less than or equal to 42° C. when hybridized to any such off-target alignment. In embodiments, the method includes removing from the second subset any probe sequence including a predicted melting temperature of less than or equal to 40° C. In embodiments, the non-transitory computer-readable medium is a computing device. In embodiments, the computing device is a personal computer system, server computer system, hand-held or laptop device, multiprocessor system, microprocessor-based system, set top box, programmable consumer electronic, network PC, minicomputer system, mainframe computer system, smartphone, or distributed cloud computing environments that include any of the above systems or devices. The computing device can include one or more processors or processing units, a memory architecture that may include RAM and non-volatile memory. The memory architecture may further include removable/non-removable, volatile/non-volatile computer system storage media. Further, the memory architecture may include one or more readers for reading from and writing to a non-removable, non-volatile magnetic media, such as a hard drive, a magnetic disk drive for reading from and writing to a removable, non-volatile magnetic disk, and/or an optical disk drive for reading from or writing to a removable, non-volatile optical disk such as a CD-ROM or DVD-ROM.

[0165] In an aspect is provided a system for designing oligonucleotide probes for a target gene. In embodiments, the system includes a memory storing computer-executable instructions; and a processor configured to execute the instructions to: (a) generate a plurality of candidate probe sequences, each comprising a first segment and a second segment of between 15 and 20 nucleotides; (b) identify a first subset of the candidate probe sequences that are complementary to an exon sequence of the target gene; (c) select a second subset from the first subset based on GC content, avoidance of shared sequence regions, and melting temperature thresholds for on-target and off-target hybridization; (d) compare the Hamming distance between the first and second segments of each probe sequence and all others in the second subset; and (e) exclude from the second subset any probe sequence in which either segment has a Hamming distance of less than three compared to a corresponding segment of another probe sequence in the second subset.

[0166] In embodiments, the system includes one or more processing units CPU(s) (also referred to as processors), one or more network interfaces, a user interface including a display and an input module, a non-persistent, a persistent memory, and one or more communication buses for interconnecting these components. The one or more communication buses optionally include circuitry (sometimes called a chipset) that interconnects and controls communications between system components. The non-persistent memory typically includes high-speed random access memory, such as DRAM, SRAM, DDR RAM, ROM, EEPROM, flash memory, whereas the persistent memory typically includes CD-ROM, digital versatile disks (DVD) or other optical storage, magnetic cassettes, magnetic tape, magnetic disk storage or other magnetic storage devices, magnetic disk storage devices, optical disk storage devices, flash memory devices, or other non-volatile solid state storage devices. The persistent memory optionally includes one or more storage devices remotely located from the CPU(s). The persistent memory, and the non-volatile memory device(s) within the non-persistent memory, comprise non-transitory computer readable storage medium. In embodiments, one or more of the above identified elements are stored in one or more of the previously mentioned memory devices, and correspond to a set of instructions for performing a function described above. The above identified modules, data, or programs (e.g., sets of instructions) need not be implemented as separate software programs, procedures, datasets, or modules, and thus various subsets of these modules and data may be combined or otherwise re-arranged in various implementations.

[0167] In embodiments, the computing device includes memory in electronic communication with the processor. The memory architecture may include at least one program module implemented as executable instructions that are configured to carry out one or more steps of a method set forth herein. For example, executable instructions may include an operating system, one or more application programs, other program modules, and program data. Generally, program modules may include routines, programs, objects, components, logic, and data structures that perform particular tasks. A computing device can optionally communicate with one or more external devices such as a keyboard, a pointing device (e.g., a mouse), a display, such as a graphical user interface (GUI), or other device that facilitates interaction of a use with the unmanned autonomous vehicle. Similarly, the computing device can communicate with other devices (e.g., via network card, modem, etc.). Such communication can occur via I/O interfaces. In embodiments, the computing system may communicate with one or more networks such as a local area network (LAN), a general wide area network (WAN), and/or a public network (e.g., the Internet) via a suitable network adapter.

[0168] In embodiments, the computing device includes software with instructions configured to perform a method as described herein. The software component of the computer system also preferably accepts one or more parameters or ranges of parameters for use in selecting nucleotide probes. Exemplary parameters that can be accepted by the software component include: probe length, maximum distance from the 3′-end or 5′-end of the target sequence, the maximum and/or minimum allowable binding energy scores (including perfect-match and/or cross-hybridization binding energies), upper and/or lower limits of acceptable base composition (e.g., G %, C %, A %, T %, G+C %, A-C %), the longest permissible single base run, and the maximum number of base overlap allowed among different probes. The software component can also accept parameters, such as temperature, salt concentration and target polynucleotide concentration, for use in calculating hybridization binding energies. These values can be input, e.g., directly by a user or, alternatively, can be read by the software component from a file.

[0169] FIG. 4 shows an example computer system that can implement methods provided herein. For example, the present disclosure provides computer systems that are programmed to implement methods of the disclosure. FIG. 4 shows a computer system 501 that is programmed or otherwise configured to analyze a tissue sample including a plurality of cells. The computer system 501 can regulate various aspects of components of the system of the present disclosure. The computer system 501 can be an electronic device of a user or a computer system that is remotely located with respect to the electronic device. The electronic device can be a mobile electronic device.

[0170] The computer system 501 includes a central processing unit (CPU, also “processor” and “computer processor” herein) 505, which can be a single core or multi core processor, or a plurality of processors for parallel processing. The computer system 501 also includes memory or memory location 510 (e.g., random-access memory, read-only memory, flash memory), electronic storage unit 515 (e.g., hard disk), communication interface 520 (e.g., network adapter) for communicating with one or more other systems, and peripheral devices 525, such as cache, other memory, data storage and/or electronic display adapters. The memory 510, storage unit 515, interface 520 and peripheral devices 525 are in communication with the CPU 505 through a communication bus (solid lines), such as a motherboard. The storage unit 515 can be a data storage unit (or data repository) for storing data. The computer system 501 can be operatively coupled to a computer network (“network”) 530 with the aid of the communication interface 520. The network 530 can be the Internet, an internet and/or extranet, or an intranet and/or extranet that is in communication with the Internet. The network 530 in some cases is a telecommunication and/or data network. The network 530 can include one or more computer servers, which can enable distributed computing, such as cloud computing. The network 530, in some cases with the aid of the computer system 501, can implement a peer-to-peer network, which may enable devices coupled to the computer system 501 to behave as a client or a server.

[0171] The CPU 505 can execute a sequence of machine-readable instructions, which can be embodied in a program or software. The instructions may be stored in a memory location, such as the memory 510. The instructions can be directed to the CPU 505, which can subsequently program or otherwise configure the CPU 505 to implement methods of the present disclosure. Examples of operations performed by the CPU 505 can include fetch, decode, execute, and writeback.

[0172] The CPU 505 can be part of a circuit, such as an integrated circuit. One or more other components of the system 501 can be included in the circuit. In some cases, the circuit is an application specific integrated circuit (ASIC).

[0173] The storage unit 515 can store files, such as drivers, libraries and saved programs. The storage unit 515 can store user data, e.g., user preferences and user programs. The computer system 501 in some cases can include one or more additional data storage units that are external to the computer system 501, such as located on a remote server that is in communication with the computer system 501 through an intranet or the Internet. The computer system 501 can communicate with one or more remote computer systems through the network 530. For instance, the computer system 501 can communicate with a remote computer system of a user. Examples of remote computer systems include personal computers (e.g., portable PC), slates, or tablets (e.g., Apple® iPad, Samsung® Galaxy Tab), telephones, Smart phones (e.g., Apple® iPhone, Android-enabled device, Blackberry®), or personal digital assistants. The user can access the computer system 501 via the network 530.

[0174] Methods as described herein can be implemented by way of machine (e.g., computer processor) executable code stored on an electronic storage location of the computer system 501, such as, for example, on the memory 510 or electronic storage unit 515. The machine executable or machine readable code can be provided in the form of software. During use, the code can be executed by the processor 505. In some cases, the code can be retrieved from the storage unit 515 and stored on the memory 510 for ready access by the processor 505. In some situations, the electronic storage unit 515 can be precluded, and machine-executable instructions are stored on memory 510.

[0175] The code can be pre-compiled and configured for use with a machine having a processor adapted to execute the code, or can be compiled during runtime. The code can be supplied in a programming language that can be selected to enable the code to execute in a pre compiled or as-compiled fashion.

[0176] Examples of the systems and methods provided herein, such as the computer system 501, can be embodied in programming. Various aspects of the technology may be thought of as “products” or “articles of manufacture” typically in the form of machine (or processor) executable code and/or associated data that is carried on or embodied in a type of machine readable medium. Machine-executable code can be stored on an electronic storage unit, such as memory (e.g., read-only memory, random-access memory, flash memory) or a hard disk.

[0177] “Storage” type media can include any or all of the tangible memory of the computers, processors or the like, or associated modules thereof, such as various semiconductor memories, tape drives, disk drives and the like, which may provide non-transitory storage at any time for the software programming. All or portions of the software may at times be communicated through the Internet or various other telecommunication networks. Such communications, for example, may enable loading of the software from one computer or processor into another, for example, from a management server or host computer into the computer platform of an application server. Thus, another type of media that may bear the software elements includes optical, electrical and electromagnetic waves, such as used across physical interfaces between local devices, through wired and optical landline networks and over various air-links. The physical elements that carry such waves, such as wired or wireless links, optical links or the like, also may be considered as media bearing the software. As used herein, unless restricted to non-transitory, tangible “storage” media, terms such as computer or machine “readable medium” refer to any medium that participates in providing instructions to a processor for execution.

[0178] Hence, a machine readable medium, such as computer-executable code, may take many forms, including but not limited to, a tangible storage medium, a carrier wave medium or physical transmission medium. Non-volatile storage media (e.g., computer-readable media) include, for example, optical or magnetic disks, such as any of the storage devices in any computer(s) or the like, such as may be used to implement the databases, etc. shown in the drawings. Volatile storage media include dynamic memory, such as main memory of such a computer platform. Tangible transmission media include coaxial cables; copper wire and fiber optics, including the wires that comprise a bus within a computer system. Carrier-wave transmission media may take the form of electric or electromagnetic signals, or acoustic or light waves such as those generated during radio frequency (RF) and infrared (IR) data communications. Common forms of computer-readable media therefore include for example: a floppy disk, a flexible disk, hard disk, magnetic tape, any other magnetic medium, a CD-ROM, DVD or DVD-ROM, any other optical medium, punch cards paper tape, any other physical storage medium with patterns of holes, a RAM, a ROM, a PROM and EPROM, a FLASH-EPROM, any other memory chip or cartridge, a carrier wave transporting data or instructions, cables or links transporting such a carrier wave, or any other medium from which a computer may read programming code and/or data. Many of these forms of computer readable media may be involved in carrying one or more sequences of one or more instructions to a processor for execution.

[0179] The computer system 501 can include or be in communication with an electronic display 535 that comprises a user interface (UI) 540 for tissue sample analysis. Examples of UIs include, without limitation, a graphical user interface (GUI) and web-based user interface. Methods and systems of the present disclosure can be implemented by way of one or more algorithms. An algorithm can be implemented by way of software upon execution by the central processing unit 505.

[0180] As another example, the computer storage media may be implemented using magnetic or optical technology. In such implementations, the program modules may transform the physical state of magnetic or optical media, when the software is encoded therein. These transformations may include altering the magnetic characteristics of particular locations within given magnetic media. These transformations may also include altering the physical features or characteristics of particular locations within given optical media, to change the optical characteristics of those locations. Other transformations of physical media are possible without departing from the scope of the present description, with the foregoing examples provided only to facilitate this discussion.

[0181] According to certain embodiments, the above-described data feeds may be stored in databases such as database servers that store master data as well as logging and trace information. The databases may also provide an API and/or API access (e.g., for open source) to the web server for data interchange based on JSON specifications. According to certain embodiments, the database servers may be optimally designed for storing large amounts of data, responding quickly to incoming requests, having a high availability and historizing master data.

[0182] Certain embodiments of the present disclosure are described above with reference to block and flow diagrams of systems and methods and/or computer program products according to example embodiments of the present disclosure. It will be understood that one or more blocks of the block diagrams and flow diagrams, and combinations of blocks in the block diagrams and flow diagrams, respectively, may be implemented by computer-executable program instructions. Likewise, some blocks of the block diagrams and flow diagrams may not necessarily need to be performed in the order presented, or may not necessarily need to be performed at all, according to some embodiments of the present disclosure.

[0183] These computer-executable program instructions may be loaded onto a general-purpose computer, a special-purpose computer, a processor (e.g., a processor chip, single/multiprocessor architectures, sequential (Von Neumann)/parallel architectures, and specialized circuits, etc.), or other programmable data processing apparatus to produce a particular machine, such that the instructions that execute on the computer, processor, or other programmable data processing apparatus create means for implementing one or more functions specified in the flow diagram block or blocks. These computer program instructions may also be stored in a computer-readable memory that may direct a computer or other programmable data processing apparatus to function in a particular manner, such that the instructions stored in the computer-readable memory produce an article of manufacture including instruction means that implement one or more functions specified in the flow diagram block or blocks.

[0184] As an example, embodiments of the present disclosure may provide for a computer program product, including a computer-usable medium having a computer-readable program code or program instructions embodied therein, said computer-readable program code adapted to be executed to implement one or more functions specified in the flow diagram block or blocks. The computer program instructions may also be loaded onto a computer or other programmable data processing apparatus to cause a series of operational elements or steps to be performed on the computer or other programmable apparatus to produce a computer-implemented process such that the instructions that execute on the computer or other programmable apparatus provide elements or steps for implementing the functions specified in the flow diagram block or blocks.

[0185] Accordingly, blocks of the block diagrams and flow diagrams support combinations of means for performing the specified functions, combinations of elements or steps for performing the specified functions and program instruction means for performing the specified functions. It will also be understood that each block of the block diagrams and flow diagrams, and combinations of blocks in the block diagrams and flow diagrams, may be implemented by special-purpose, hardware-based computer systems that perform the specified functions, elements or steps, or combinations of special-purpose hardware and computer instructions.

[0186] Various aspects described herein may be implemented using standard programming and/or engineering techniques to produce software, firmware, hardware, and/or any combination thereof to control a computing device to implement the disclosed subject matter. A computer-readable medium may include, for example: a magnetic storage device such as a hard disk, a floppy disk or a magnetic strip; an optical storage device such as a compact disk (CD) or digital versatile disk (DVD); a smart card; and a flash memory device such as a card, stick or key drive, or embedded component. Additionally, it should be appreciated that a carrier wave may be employed to carry computer-readable electronic data including those used in transmitting and receiving electronic data such as streaming video or in accessing a computer network such as the Internet or a local area network (LAN). Of course, a person of ordinary skill in the art will recognize many modifications may be made to this configuration without departing from the scope or spirit of the claimed subject matter.

### Examples

### Example 1. Code-Probe Considerations

[0187] The human cell contains about 20,000 to 30,000 genes coding for functional proteins, yet only a small fraction is expressed in any cell at any time. The specific phenotype of a cell is thus derived from the expression of the subset of genes, and studies of cell phenotypes can be performed by gene expression analysis. Messenger RNA (mRNA) is the molecular carrier transporting genetic information from nuclear DNA to the cytoplasmic machinery of protein synthesis. Consequently, mRNA provides an ideal point of investigation in understanding gene functions and correlating their expression to the physiological and pathological phenotype of cells and tissues. For example, analyzing gene expression levels and the biological pathways associated with the genes involved in a cancer, enables one can study the difference between normal cell and cancerous cell pathways to determine the genetic origin of the faulty pathway, thereby identifying potential targets for treating cancer. Furthermore, gene expression analysis facilitates the discovery of biomarkers and gene signatures, which are crucial for diagnosing diseases, monitoring their progression, and predicting responses to therapeutic treatments. In cancer, gene expression profiling aids in developing gene biomarkers and signatures that enhance diagnosis, track disease progression, and predict treatment outcomes, ultimately contributing to personalized medicine approaches.

[0188] Traditional methods for analyzing gene expression are essential tools in molecular biology, involving the extraction and quantification of mRNA from cells or tissues. One foundational technique is Northern blotting, where specific RNA molecules are detected within a sample by separating RNA by gel electrophoresis, transferring it to a membrane, and hybridizing it with a labeled complementary probe, with the signal intensity reflecting the presence and quantity of the target RNA. A brute-force approach of capturing gene expression information is simply by isolating regions of interest from within a sample. For example, these regions can then be individually placed in test tubes for RNA extraction and subsequent gene expression profiling. For comprehensive data on the entire transcriptome, RNA sequencing (RNA-Seq) is often employed. In RNA-Seq, RNA is converted to cDNA and used to make a library of nucleic acid molecules, which are then sequenced on next generation sequencing (NGS) platforms like the G4™ or NextSeq 2000™.

[0189] Instead of extracting RNA molecules from individual parts (or cells) within a tissue, one can visualize them directly in their original environment. Detecting RNA in situ with spatial surroundings provides critical insights into the spatial organization of gene expression, enhancing our understanding of tissue architecture, cellular interactions, developmental processes, disease mechanisms, and functional genomics. Detecting nucleic acid molecules in cells or tissues enables the observation of spatial heterogeneity within tissues, revealing how gene expression varies across different regions and cell types, and illuminates how local interactions regulate gene expression patterns. Technologically, in situ RNA detection preserves spatial information that is often lost in traditional bulk RNA sequencing, providing a more accurate representation of gene expression patterns. With single-cell resolution, it enables detailed analysis of cellular diversity and heterogeneity, and when combined with other imaging techniques, it offers a multi-dimensional view of cellular function.

[0190] An early variant of in situ hybridization (ISH) detection was published in the late 1960s (J. G. Gall, M. L. Pardue, Proc. Natl. Acad. Sci. USA 1969, 63, 378) and has since evolved for visualizing gene expression. One widely used in situ technique is Fluorescence In Situ Hybridization (FISH). FISH utilizes fluorescently labeled probes that hybridize to specific RNA sequences within the tissue. This method allows for the visualization and localization of target RNA molecules with high spatial resolution. FISH is particularly useful for detecting specific gene transcripts and chromosomal abnormalities. However, the number of distinct fluorophores that can be used simultaneously is limited due to spectral overlap. The number of RNA species that can be simultaneously imaged by FISH has been limited. Most experiments stain and image only one RNA species at a time, and even the most advanced multiplexing efforts have only extended this approach to the simultaneous measurement of approximately 10-30 RNA species (Lubeck E, Coskun A F, Zhiyentayev T, Ahmad M, Cai L. Single-cell in situ RNA profiling by sequential hybridization. Nat. Methods. 2014; 11:360-361 and Martin K C, Ephrussi A. mRNA localization: gene expression in the spatial dimension. Cell. 2009; 136:719-730). However, many interesting questions require much higher levels of multiplexing, such as transcriptional definitions of cell phenotyping. Additionally, the resolution of FISH detection, while sufficient for many applications, may not be adequate for detecting very small or low-abundance transcripts, potentially leading to incomplete or biased gene expression data.

[0191] Multiplexed, Error-Robust, Fluorescence In Situ Hybridization (MERFISH) (Chen et al. Science. 2015; 348:aaa6090) enables multiplexing by assigning barcodes to different RNA species and then reading out these barcodes through successive rounds of hybridization and imaging on the same sample. NanoString Technologies (now Bruker Spatial Biology) provides a platform for in situ gene expression, the CosMX Spatial Molecular Imager, which utilizes barcoded probes to target thousands of RNA sequences simultaneously, greatly improving multiplexing. 10× Genomics also offers a platform to in situ analysis relying on barcoded probes. In these approaches, each RNA species is often identified not by a single color of fluorescently labeled FISH probe but rather with a unique combination or “barcode” of colors. For example, one RNA molecule might be identified by red-labeled probes alone while another might be identified by the combination of red-, green-, and yellow-labeled probes. The barcoded probes extend the concept used by FISH probes, by replacing the single fluorescent label with a barcode domain. The barcode domain contains consecutive regions that hybridize to unique reporters that are read out over sequential imaging rounds. In practice, a substantial limitation to multiplexing arises from the readout errors that are inherent to FISH. For example, occasionally an RNA molecule that should fluoresce in one imaging round does not accumulate enough fluorescently labeled probe to produce a bright enough signal to be detected. Additionally, stray probes or a bright autofluorescent spots in the cell can sometimes produce a spot bright enough to be called an RNA when it is not actually present.

[0192] Barcoded probes typically include both a target sequence binding domain (e.g., 60-80 nucleotides) and a unique barcode domain (e.g., 40-50 nucleotides). The necessity of unique barcodes for each target limits the number of RNA species that can be analyzed simultaneously, constraining multiplexing capacity. Managing these barcodes introduces additional complexity and potential sources of error, as there is a risk of barcode cross-reactivity and misassignment, which can lead to erroneous data. Furthermore, the added barcode sequence may interfere with the binding efficiency or stability of the probe, potentially compromising sensitivity and specificity. For example, if a barcoded probe binds to an off-target sequence due to a mismatch in the target domain or off-target hybridization of the barcode domain, the detection of the barcode could lead to a false positive, mistakenly identifying the target RNA as present. Barcodes can also increase the molecular weight and steric hindrance of probes, potentially affecting their performance in dense or complex tissue environments.

[0193] In the context of in situ RNA detection, relying on barcodes for target identification presents several challenges. One significant issue is the limited spatial resolution that can result from insufficient barcode sequence length. If the barcode is too short, it may not generate enough unique sequences to accurately identify and distinguish between different RNA molecules within the complex tissue environment, leading to overestimation of molecular counts due to amplification artifacts. On the other hand, an overly long barcode sequence or an inadequate number of barcode sequences can result in under-sampling, where not all unique RNA molecules are captured, causing underestimation of molecular counts. Additionally, errors during barcode sequence synthesis or sequencing can introduce noise and cause misassignment of barcodes, complicating the spatial mapping of RNA molecules and leading to inaccuracies in gene expression data. This misidentification can be particularly problematic in in situ hybridization, where precise spatial information is crucial for understanding tissue architecture and cellular interactions. Moreover, the additional steps required for decoding and mapping barcode sequences increase the complexity and computational burden of the analysis, making the process more time-consuming and prone to errors.

[0194] In contrast, the “barcode-free” probes described herein includes the target sequence binding domain and utilizes sequencing that domain for target identification, offer significant advantages. These probes simplify design and synthesis, reduce production costs, and enhance scalability. Without barcodes, there is less risk of cross-reactivity, and the binding efficiency and stability of the probes are potentially improved, leading to higher sensitivity and specificity. Additionally, without the need for barcode decoding, data processing is streamlined, reducing computational demands. The streamlined data processing reduces computational demands, making “barcode-free” probes a superior choice for comprehensive and efficient in situ gene expression analysis. The uniqueness of these probes enables the detection of a vast array of genes, (e.g., greater than 250 different target sequences) within the same sample without unintended non-specific interactions with other cellular components, particularly genomic DNA which exhibits a natural non-specific affinity for single stranded DNA. Careful design of the sequences is thus required to ensure target specificity and orthogonality to other probes when detecting multiple targets.

[0195] The approach described herein significantly enhances specificity and robustness by requiring two hybridization events for detection of a target sequence. As illustrated in FIG. 1, each oligonucleotide probe includes two target hybridization sequences (code-foot 1 and code-foot 2). These sequences bind to adjacent regions of the target RNA. Following successful binding of both code-feet, a ligation step forms a circular polynucleotide, which may be amplified using rolling circle amplification (RCA), and subsequently detected. This dual-binding requirement ensures that if only one code-foot binds to an off-target sequence, the second code-foot will likely fail to bind, preventing the formation of an amplifiable circular probe and thus avoiding false positives. This mechanism significantly enhances the accuracy and specificity of target detection compared to single hybridization events employed in common barcoded probe techniques.

### Example 2. Code-Probe Design

[0196] In our current implementation of Code-Probe detection, each oligonucleotide probe includes three basic components as illustrated in FIG. 1. A code probe is a single-stranded oligonucleotide that includes a first code-foot (e.g., 3′ code-foot) and a second code-foot (e.g., 5′ code-foot) on either end and is linked together via a linking oligonucleotide sequence (referred to as a backbone). The linking oligonucleotide sequence may include one or more primer binding sequences (e.g., an amplification and/or sequencing primer binding sequence) and/or a error-correcting barcode which may be sequenced in combination with the code-feet.

[0197] In designing our panel of probes for gene expression analysis, we imposed several stringent constraints to ensure specificity and efficiency. Each probe consists of two hybridization sequences, referred to herein as code-feet, that are typically less than 20 bp each. Additionally, each code-foot was constrained to a GC content of 45-65% and prohibited from containing four consecutive guanines (Gs) or cytosines (Cs) to minimize the risk of secondary structures and non-specific binding. The binding of the probe to the target sequence should be tight and highly specific in order to avoid any interference, for example having less than or equal to 8 bp overlap with any backbone. The thermodynamics of base pairing, in fact, determine the strength of binding while the nucleotide combination ensures its specificity as a consequence of the uniqueness of base succession. However, unique sequences endowed with high binding energy are not necessarily good probes if the target sequence is inaccessible due to secondary structures.

[0198] Both the sensitivity and specificity of a particular probe depends upon the binding energies, AG, of polynucleotide molecules to the probe. In particular, the hybridization intensity traces a sigmoidal curve which follows the melting curve of the probe, decreasing as the binding energy increases. Specificity, however, is maximum at or slightly above the melting temperature of the probe (i.e., at a binding energy that is equal to or slightly greater than zero). Thus, in embodiments, the sensitivity and/or specificity are determined or predicted from the binding energies, provided additional criteria described herein are met. It is noted that the skilled artisan readily appreciates that the term “binding energy,” as used herein, refers to the difference of the energy of polynucleotide molecules (e.g., a target polynucleotide and a polynucleotide probe) when they are in a bound state (i.e., when they are bound or hybridized to each other) from when they are in an unbound state. This definition is readily expressed mathematically by the formula ΔG=G_{bound}−G_{unbound}. Thus, a polynucleotide that has the “largest” binding energy to a particular probe is one for which the difference between the energies of the bound and unbound polynucleotide is greatest. In particular and as the skilled artisan also readily appreciates, because the energy of polynucleotides in a bound state is ordinarily lower than the energy of the unbound polynucleotides, the binding energy (i.e., AG) will ordinarily be a negative number. Thus, as used herein, the polynucleotide having the “largest” binding energy to a particular probe will, in fact, be the polynucleotide for which AG is the most negative.

[0199] Reliable oligonucleotide design is crucial for successful binding and detection, and given the diversity of targets and multiplexing, the design of oligonucleotides requires flexibility in the approach. Thus, a number of oligonucleotide design tools exist, for example PrimerSelect (Plasterer T N., Methods Mol. Biol., 1997, vol. 70 (pg. 291-302)), Primer Express (Applied BiosystemsPrimer Express® Software Version 3.0 Getting Started Guide, 2004), OLIGO 7 (Rychlik W., Methods Mol. Biol., 2007, vol. 402 (pg. 35-60)) and Primer3 (Untergasser, A. et al., Nucleic Acids Res 40, e115 (2012)). Additional online tools, for example the OligoAnalyzer™ Tool provided by Integrated DNA Technologies (accessible at www.sg.idtdna.com/pages/tools/oligoanalyzer) or PrimerROC (Johnston, A. D., Lu, J., Ru, Kl. et al. Sci Rep 9, 209 (2019)) sheds additional insight into the secondary structure of oligonucleotides and the resulting amplification products, as well as the self- and heterodimerization tendencies of each primer set. Primer-BLAST is another web service that supports the selection of effective sequences by considering opportunities for mispriming across an entire genome or transcriptome (Sayers E W et al., Nucleic Acids Res., 2012, vol. 40 (pg. D13-D25)). Additionally, RNAFold, provided with ViennaRNA Package 2.0 (Lorenz R, et al. Algorithms Mol Biol. 2011 Nov. 24; 6:26.) utilizes thermodynamic principles to determine the most stable structure based on the sequence provided, offering insights into the functional properties and cross-interactions. These tools are useful starting points for evaluating oligonucleotide sequences.

[0200] A goal of effective oligonucleotide design is to maximize detection and minimize off-target hybridization, without introducing any biases (e.g., skewing the amplification products to over- or under-represent targets). Primer3 allows for the selection of the binding sequence on the basis of melting temperature (Tm), primer length, and 3′-end stability, which was considered when designing each primer set. Calculating the melting temperature and performing thermodynamic modelling for estimating the propensity of oligonucleotides to hybridize with other oligonucleotides or to hybridize at unintended sites in the genome offer an accurate approach for predicting the energetic stability of DNA structures. For example, because of electronic effects of nucleobase stacking, the stability of 5′-CT-3′ hybridized to 3′-GA-5′ is different from that of 5′-CA-3′ hybridized to 3′-GT-5′, despite the base pairings C:G and T:A are the same. It is recommended to perform oligonucleotides analysis with sophisticated modelling capabilities to capture such electronic effects. Additionally, in silico validation of oligonucleotides may be useful. The online software OligoAnalyzer™ Tool provides information on secondary structure and the possibility of self- or heterodimer formation by the oligonucleotides sequence itself by calculating the Gibbs free energy (AG).

[0201] The design further stipulated that the feet of each probe (i.e., the hybridization sequences) must have a maximum overlap of 8 bp with each other and with the probe backbone, ensuring structural stability and minimizing non-specific interactions. Probes were specifically targeted to exonic regions, excluding any intronic sequences to focus on mature mRNA transcripts and avoid potential complications from unspliced pre-mRNA. This approach differs from alternative probes described in the literature and commercially available, which includes intronic sequences in their target binding regions.

[0202] Spacing between probe binding sequences is another complicated design consideration. Regular spacing (tiling) is the most common approach because it is easy to implement, but it does not ensure optimal positioning of probes. The geometry of folded conformations of a given RNA around the target sequence can impair the binding of a probe. The folding of RNA is a unimolecular process occurring spontaneously in situ, dependent upon the pairing of self-complementary stretches of different regions of an RNA molecule which produces a number of different secondary structures. Consequently, predictions and experimental validation of secondary structures of RNA are useful for selecting target elements.

[0203] To ensure high specificity, we required that the probes exhibit zero off-target hits, a phenomenon illustrated in FIG. 2. Off-target hits were defined using a refined approach: instead of merely counting base pairs matched in each foot, we used the predicted melting temperature (Tm) of the off-target alignment for each foot and enforced a minimum difference between the maximum off-target Tm and the maximum on-target Tm across the two feet for each probe. The true on-target Tm may be higher, but we set a maximum off-target Tm of 40° C. and an on-target Tm of 50° C. to ensure specificity. Using BLAST against the RefSeq RNA database with an E-value cutoff of 100, we refined our off-target definition to include a 3 bp cross-junction requirement, which potentially leads to false-negatives but ensures rigorous specificity. Additional cross checks against GENCODE, RefSeq, or CHESS databases can also be performed. With these parameters, we can generate at least one probe for all genes in our immuno-oncology panel, optimizing both the specificity and efficiency of our probe design. In embodiments, we generate at least 3 probes per gene.

[0204] Each respective code-foot serves two purposes, binding to a specific target sequence, and following circularization, each code-foot may be detected to provide an identifier for the target sequence. The oligonucleotide probes used herein must satisfy two purposes: (1) specifically bind to a target nucleic acid molecule including a target sequence and (2) maintain dissimilarity between all other binding sequences to uniquely identify the target nucleic acid molecule. Regarding the first goal, designing target binding regions with a high melting temperature (Tm) alone is not sufficient. The geometry of folded RNA conformations around the target sequence can hinder probe binding. RNA folding is a spontaneous, unimolecular process, involving the pairing of self-complementary regions of the RNA molecule, which produces various secondary structures. Therefore, accurate predictions of RNA secondary structures are essential for selecting target sequences that are suitable for probe design. Further, to enable identification of unique targets the resulting sequences should be designed to include orthogonality (e.g., ensuring a particular Hamming distance) to increase the accuracy of target identification. The Hamming Distance between two sequences (i.e., the number of nucleotides that must be switched to convert one barcode sequence into another) is a useful concept in understanding the behaviors of these encoding schemes. Increasing the minimum Hamming Distance between used sequences by leaving more possible sequences unassigned will produce even larger reductions in a misidentification rate.

### Example 3. Code-Probes for Immuno-Oncology

[0205] It is generally accepted that gene mutations initiate cancer development. Proto-oncogenes, such as Ras, are transcribed into products like receptors, growth factors, transcription factors, and signaling enzymes crucial for cellular proliferation. Gain-of-function mutations in proto-oncogenes result in dominant oncogenes that differ from their proto-oncogenes or are over-expressed. These mutations can occur through point mutations, localized reduplication, or chromosomal translocation, leading to disrupted cellular activity and uncontrolled cell division, ultimately resulting in cancer. Measuring biological activity simultaneously in both the tumor and the immune system is key to predicting who will respond to immunotherapy, rationally design novel immunotherapy treatments, and understand the biological underpinnings of cancer.

[0206] The immune response to tumors is a complex, multifactorial interaction that is shaped by the host, the tumor, and the environment. By analyzing immune-oncology (IO) gene expression levels and the biological pathways associated with these genes, researchers can differentiate between normal and cancerous cell pathways, determining the genetic origin of the faulty pathways. This differentiation aids in identifying potential targets for cancer treatment. Moreover, gene expression analysis facilitates class discovery, identifying novel cancer subtypes, and class prediction, assigning tumor samples to pre-defined classes to predict outcomes. This approach allows for the discovery of biomarkers and gene signatures, enabling the diagnosis, progression, and aggressiveness analyses, prognosis, and prediction of therapeutic treatment. It also helps identify patients who would benefit from specific therapies, enhancing our understanding of the disease and its biology.

[0207] In this disclosure, we developed a probe panel for immuno-oncology, designed with stringent constraints to ensure high specificity and efficiency. Each probe consists of two code-feet having a GC content of 45-65% and do not contain four consecutive guanines (Gs) or cytosines (Cs), minimizing secondary structures and non-specific binding. The probes target exonic regions, excluding intronic sequences to focus on mature mRNA transcripts. We ensured zero off-target hits by defining off-targets based on predicted melting temperatures (Tm) and requiring a minimum difference between the maximum off-target Tm and the maximum on-target Tm across the two feet of each probe. See FIG. 3 for an example of the workflow. Using these stringent criteria, we achieved a maximum off-target Tm of 40° C. and an on-target Tm of 50° C., allowing us to generate at least one probe for all genes in our immuno-oncology panel. This approach ensures reliable and accurate detection of target gene sequences, crucial for advancing cancer research and therapy.

[0208] Suitable gene targets were determined to be universal across different tissue types (e.g., kidney, tonsil, breast, colon, lung). For some genes we purposely designed fewer than 24 probes, this was based on empirical data showing that these genes are extremely abundant in some cell types, leading to optical density issues. For other genes, the natural sequence diversity did not allow us to design 24 probes within our design constraints (e.g., GC content, Hamming Distance). The probes provided herein, for example in the sequence listing and incorporated herein, discloses the 5′ code-foot and the 3′ code-foot useful for targeting particular gene targets: ABCG2, ACE2, ACKR1, ACKR4, ACTA2, ACTG2, ADIPOQ, AGR3, AKT1, ALDOB, ANGPT2, ANKRD29, ANKRD30A, AQP1, AQP2, AQP3, AQP5, AR, ARG1, ATP6V0D2, BATF, BCL2, BEST2, BEST4, BTLA, C1QA, C1QB, C1QC, CALB1, CAVIN2, CCK, CCL2, CCL20, CCL3, CCL4, CCL5, CCR2, CCR5, CCR7, CD14, CD163, CD19, CD1C, CD2, CD247, CD27, CD274, CD276, CD28, CD33, CD34, CD36, CD38, CD3D, CD3E, CD4, CD40, CD40LG, CD44, CD47, CD68, CD70, CD74, CD79A, CD80, CD86, CD8A, CEACAM8, CKB, CLDN10, CLEC9A, CLU, COL1A1, CP, CSF1R, CSPG4, CTLA4, CTSL, CTSS, CUBN, CX3CL1, CX3CR1, CXCL10, CXCL11, CXCL12, CXCL13, CXCL9, CXCR3, CXCR4, CXCR5, CXCR6, CYP1A1, DCLK1, DEFA5, DES, DGKG, DMBT1, DMKN, DPT, DST, ECSCR, EGFR, EOMES, ERBB2, ERCC-00019, ERCC-00024, ERCC-00059, ERCC-00142, ERCC-00143, ESM1, ESR1, FABP1, FAP, FAS, FASN, FBLN1, FBN1, FCAR, FCGR1A, FCGR3A, FGB, FGFR4, FLNB, FN1, FOXA1, FOXI1, FOXJ1, FOXP3, FSCN1, GATA3, GATM, GIP, GNLY, GPC1, GPR183, GRHL1, GZMA, GZMB, GZMH, GZMK, HAVCR2, HLA-A, HLA-DRA, HOXD8, HSP90AA1, ICA1, ICOSLG, ID2, IDO1, IFNG, IGHA1, IGHD, IGHG1, IGHM, IL10, IL10RA, IL17A, IL1B, IL2RA, IL2RB, IL6, IL7R, INS, IRF1, ITGAM, ITGAX, ITGB2, JCHAIN, KDR, KIT, KLRB1, KLRD1, KLRF1, KLRK1, KRAS, KRT14, KRT23, KRT5, KRT6B, KRT7, KRT8, LAG3, LAMC3, LARS1, LGR5, LPL, LRP2, LTBP2, LUM, LYVE1, MADCAM1, MAPK1, MEDAG, MET, MLN, MLPH, MMP1, MMRN1, MMRN2, MRC1, MS4A1, MUC1, MUC2, MUC5AC, MUC5B, MYH11, MYLK, NCAM1, NCR1, NEUROD1, NEUROG3, NKG7, NOS1, NPHS2, NRXN1, NTS, OLFM4, PDCD1, PDCD1LG2, PDE4A, PDGFRA, PDGFRB, PDK4, PDPN, PECAM1, PGR, PHGR1, PIM1, PLIN1, PODXL, POLR2A, POSTN, POU2F3, PPARG, PRDM1, PRF1, PTGDS, PTGS2, PYY, RARRES1, RBP2, RGS5, RSPO3, S100A9, SCGB1A1, SCGB3A2, SDC1, SELE, SELL, SERPINA3, SFTPD, SH2D6, SLC12A1, SLC12A3, SLC26A4, SLC2A1, SLC4A1, SLC4A9, SLC8A1, SNCA, SNCG, SOX10, SPP1, SST, STAT1, STAT3, STAT4, STC1, TAGLN, TAP1, TAP2, TBX21, TCL1A, TFPI, TGFB1, THY1, TIGIT, TLR2, TLR4, TLR9, TMPRSS2, TNF, TNFRSF17, TNFRSF4, TNFRSF9, TNFSF13B, TNFSF9, TOMM7, TP63, TPD52, UMOD, UPK3B, VCAM1, VCAN, VEGFA, VIM, VWF, and WARS1. The table is formatted such that the 5′ code-foot is paired with the respective 3′ code-foot immediately across in the same horizontal row to form the probe binding sequence. For example, a probe binding sequence may be the concatenation of the two sequences SEQ ID NO:5710 and SEQ ID NO:1, to form 5′-TTGCATTGAGTCCTG GGCAGAAGTTTTGTC-3′ (SEQ ID NO: 11427).

[0209] The code probes additionally include a backbone which includes a sequencing primer binding sequence. In this manner, sets of probes may be combined to facilitate multiple rounds of detection. Herein we provide eight orthogonal sequencing primer sequences which may be included in the backbone of the code probe. For example, a first subset of probes may detect ABCG2, ACE2, WARS1, and VCAN wherein each probe includes the SP1 sequence. Following detection of the first subset, a second subset of probes may be used to detect ABCG2, ACE2, C1QC, and CCR5 wherein each probe in the second subset includes the SP5 sequence in the backbone. To enable greater detection, the code-foot sequences for the probe targeting ABCG2 (e.g., SEQ ID NO:1 and SEQ ID NO:5710) in the first subset may be different in the second subset (e.g., SEQ ID NO:17 and SEQ ID NO:5726). In embodiments, the backbone may include a supplemental error corrected barcode (ECB) to further facilitate multiplexing.

SEQUENCING PRIMER TABLE

| Sequencing | Sequencing primer | |
|---|---|---|
| Primer | sequence (5′ to 3′) | |
| SP1 | ACACTCTTTCCCTACAC | SEQ |
| | GACGCTCTTCCGATC | ID |
| | | NO: |
| | | 11419 |
| SP2 | TCGGCGTTGTCTGCTAT | SEQ |
| | CGTTCTTGGCACTCC | ID |
| | | NO: |
| | | 11420 |
| SP3 | CACAACGGGAGCTGTGG | SEQ |
| | AATTGGTTCACCTGG | ID |
| | | NO: |
| | | 11421 |
| SP4 | TGTTGCATCTCCACCCG | SEQ |
| | GATTGAGCCTTCAGC | ID |
| | | NO: |
| | | 11422 |
| SP5 | TGGACTAAGACTCGTCC | SEQ |
| | TCCAGCGGACCTAAG | ID |
| | | NO: |
| | | 11423 |
| SP6 | TACGACACACTCGGGCT | SEQ |
| | CTATGGGCTTCATGG | ID |
| | | NO: |
| | | 11424 |
| SP7 | GTATGATGGTGTTGCGG | SEQ |
| | CTTCTCGCTTAACGC | ID |
| | | NO: |
| | | 11425 |
| SP8 | TCTTGAGTCATTCGCAG | SEQ |
| | GGCATGTGCCAGACC | ID |
| | | NO: |
| | | 11426 |

[0210] Controls. The National Institute of Standards and Technology (NIST) developed the External RNA Controls Consortium (ERCC) to derive universal references. The ERCC assembled a sequence library of 176 DNA sequences that could be transcribed into RNA to serve as controls in systems used to measure gene expression. These controls were cataloged as ERCC-00001 through ERCC-00176, and are collectively referred to as ERCC controls. We designed probes to be specific to some ERCC probes, enabling the detection of false-positive ERCC probes.

What is claimed is:

1. A computer-implemented method designing a gene probe for a target gene, comprising:
generating, by a processor, a plurality of probe sequences, each probe sequence comprising a first segment and a second segment, each segment comprising computationally derived characters corresponding to 15 to 20 nucleotides;
selecting from the plurality a first subset of probe sequences wherein each segment is complementary to a sequence of the target gene; and
selecting, from the first subset, a second subset of probe sequences comprising:
45% to 65% guanine and/or cytosine nucleotides;
no more than four consecutive guanine or cytosine nucleotides; and
a predicted melting temperature of greater than 50° C. when forming a duplex with the sequence of the target gene.

2. The computer-implemented method of claim 1, further comprising removing from the first subset any probe sequence comprising a region complementary to a sequence in a genome or transcriptome database.

3. The computer-implemented method of claim 1, wherein the sequence of the target gene comprises an exon.

4. The computer-implemented method of claim 1, wherein each probe sequence comprises a sequence overlap of less than eight nucleotides between the first segment and the second segment of the same probe sequence.

5. The method of claim 1, further comprising removing any probe sequence that overlaps with another probe sequence in the second subset.

6. The method of claim 1, further comprising:
(a) for each probe sequence in the second subset, identifying, using the computer, one or more off-target alignments, wherein an off-target alignment is a genomic or transcriptomic sequence that aligns with the probe sequence such that at least three contiguous nucleotides align to each of the first and second segments of the probe sequence; and (b) computationally removing from the second subset any probe sequence comprising a predicted melting temperature of less than or equal to 42° C. when hybridized to any such off-target alignment.

7. The method of claim 1, further comprising: (a) comparing, using the computer, for each of the first and second segments of the probe sequences in the second subset, a Hamming distance to the corresponding segment of all other probe sequences in the second subset; and (b) computationally filtering out any probe sequence in which either the first or second segment has a Hamming distance of less than three compared to any other corresponding segment in the second subset.

8. A kit comprising:
a first plurality of nucleic acid molecules, wherein each nucleic acid molecule of the first plurality comprises a first end, a backbone sequence comprising a first sequencing primer sequence, and a second end, wherein the first end comprises a sequence selected from SEQ ID NO:11428 to SEQ ID NO:13483 and the second end comprises a sequence selected from SEQ ID NO:13484 to SEQ ID NO:15539; and
a second plurality of nucleic acid molecules, wherein each nucleic acid molecule of the second plurality comprises a first end, a backbone sequence comprising a second sequencing primer sequence, and a second end, wherein the first end comprises a sequence selected from SEQ ID NO:11428 to SEQ ID NO:13483 and the second end comprises a sequence selected from SEQ ID NO:13484 to SEQ ID NO:15539.

9. The kit of claim 8, further comprising a third, fourth, fifth, and sixth plurality of nucleic acid molecules, wherein each plurality comprises a plurality of nucleic acid molecules with a different sequencing primer sequence.

10. A gene probe including a sequence 80% homologous to SEQ ID NO:11428 to SEQ ID NO:15539.

11. The gene probe of claim 10, comprising a sequence 90% homologous to SEQ ID NO:11428 to SEQ ID NO:15539.

12. The gene probe of claim 10, comprising a sequence selected from SEQ ID NO:11428 to SEQ ID NO:15539.

13. The gene probe of claim 10, comprising a first sequence selected from SEQ ID NO:11428 to SEQ ID NO:13483 and a second sequence selected from SEQ ID NO:13484 to SEQ ID NO:15539.

14. The gene probe of claim 10, further comprising a primer binding sequence, or complement thereof, selected from: SEQ ID NO:15540, SEQ ID NO:15541, SEQ ID NO:15542, SEQ ID NO:15543, SEQ ID NO:15544, or SEQ ID NO:15545.

15. A cell or tissue comprising the gene probe of claim 10.

16. The cell of tissue of claim 15, wherein the cell or tissue further comprises a concatemer comprising multiple complementary copies of the gene probe.

17. The cell or tissue of claim 16, wherein the cell or tissue is immobilized to a solid support.

18. A kit comprising the gene probe of claim 10.

19. The kit of claim 18, further comprising a polymerase and a plurality of deoxynucleotides (dNTPs).

20. The kit of claim 18, further comprising a ligase.

The application's sequence listing, which the Patent Office published only in electronic form, follows.

SEQUENCE LISTING (15545 sequences)

SEQ ID NO: 1 - DNA, 15 bp, synthetic construct
  source 1..15: mol_type = other DNA
ggcagaagttttgtc

SEQ ID NO: 2 - DNA, 15 bp, synthetic construct
  source 1..15: mol_type = other DNA
aggtcattggaagct

SEQ ID NO: 3 - DNA, 15 bp, synthetic construct
  source 1..15: mol_type = other DNA
cgctggaagcaaagc

SEQ ID NO: 4 - DNA, 15 bp, synthetic construct
  source 1..15: mol_type = other DNA
gaagaaggcatctgc

SEQ ID NO: 5 - DNA, 15 bp, synthetic construct
  source 1..15: mol_type = other DNA
tctctcaccgtcaga

SEQ ID NO: 6 - DNA, 15 bp, synthetic construct
  source 1..15: mol_type = other DNA
ccactactagctgat

SEQ ID NO: 7 - DNA, 15 bp, synthetic construct
  source 1..15: mol_type = other DNA
gctatcaaacaactt

SEQ ID NO: 8 - DNA, 15 bp, synthetic construct
  source 1..15: mol_type = other DNA
ccaacagacctgaaa

SEQ ID NO: 9 - DNA, 15 bp, synthetic construct
  source 1..15: mol_type = other DNA
ttgaagactgtgatc

SEQ ID NO: 10 - DNA, 15 bp, synthetic construct
  source 1..15: mol_type = other DNA
atcagaacatctcca

SEQ ID NO: 11 - DNA, 15 bp, synthetic construct
  source 1..15: mol_type = other DNA
tctgtagtatccgct

SEQ ID NO: 12 - DNA, 15 bp, synthetic construct
  source 1..15: mol_type = other DNA
gaacaagatggaagg

SEQ ID NO: 13 - DNA, 15 bp, synthetic construct
  source 1..15: mol_type = other DNA
gtcgtcaggaagaag

SEQ ID NO: 14 - DNA, 15 bp, synthetic construct
  source 1..15: mol_type = other DNA
atctgagttgatgac

SEQ ID NO: 15 - DNA, 15 bp, synthetic construct
  source 1..15: mol_type = other DNA
cctaagccgcgcttc

SEQ ID NO: 16 - DNA, 15 bp, synthetic construct
  source 1..15: mol_type = other DNA
ataaactgagttcca

SEQ ID NO: 17 - DNA, 15 bp, synthetic construct
  source 1..15: mol_type = other DNA
ggaagacatctggag

SEQ ID NO: 18 - DNA, 15 bp, synthetic construct
  source 1..15: mol_type = other DNA
gcaagccgaagagct

SEQ ID NO: 19 - DNA, 15 bp, synthetic construct
  source 1..15: mol_type = other DNA
taacaagaccaccaa

SEQ ID NO: 20 - DNA, 15 bp, synthetic construct
  source 1..15: mol_type = other DNA
gaagtctgcagggtt

SEQ ID NO: 21 - DNA, 15 bp, synthetic construct
  source 1..15: mol_type = other DNA
agtacgactgtgaca

SEQ ID NO: 22 - DNA, 15 bp, synthetic construct
  source 1..15: mol_type = other DNA
caaacaaaagaccta

SEQ ID NO: 23 - DNA, 15 bp, synthetic construct
  source 1..15: mol_type = other DNA
tactttcaaatgacc

SEQ ID NO: 24 - DNA, 15 bp, synthetic construct
  source 1..15: mol_type = other DNA
atggagaagatgatt

SEQ ID NO: 25 - DNA, 15 bp, synthetic construct
  source 1..15: mol_type = other DNA
acctaccagaagtca

SEQ ID NO: 26 - DNA, 15 bp, synthetic construct
  source 1..15: mol_type = other DNA
tgtggagggaggagg

SEQ ID NO: 27 - DNA, 15 bp, synthetic construct
  source 1..15: mol_type = other DNA
gacatggtgctgtaa

SEQ ID NO: 28 - DNA, 15 bp, synthetic construct
  source 1..15: mol_type = other DNA
tatcctctctcatcc

SEQ ID NO: 29 - DNA, 15 bp, synthetic construct
  source 1..15: mol_type = other DNA
tactccatcccacaa

SEQ ID NO: 30 - DNA, 15 bp, synthetic construct
  source 1..15: mol_type = other DNA
caagcctcagcatat

SEQ ID NO: 31 - DNA, 15 bp, synthetic construct
  source 1..15: mol_type = other DNA
ccttttgcatttgca

SEQ ID NO: 32 - DNA, 15 bp, synthetic construct
  source 1..15: mol_type = other DNA
actttcccaaagggc

SEQ ID NO: 33 - DNA, 15 bp, synthetic construct
  source 1..15: mol_type = other DNA
catttcattgtcgtt

SEQ ID NO: 34 - DNA, 15 bp, synthetic construct
  source 1..15: mol_type = other DNA
cagtgatgctaggag

SEQ ID NO: 35 - DNA, 15 bp, synthetic construct
  source 1..15: mol_type = other DNA
ctagctgcaaaaatc

SEQ ID NO: 36 - DNA, 15 bp, synthetic construct
  source 1..15: mol_type = other DNA
tgggtcctttgccat

SEQ ID NO: 37 - DNA, 15 bp, synthetic construct
  source 1..15: mol_type = other DNA
tccaatgctagggtc

SEQ ID NO: 38 - DNA, 15 bp, synthetic construct
  source 1..15: mol_type = other DNA
gctctcacaagcctg

SEQ ID NO: 39 - DNA, 15 bp, synthetic construct
  source 1..15: mol_type = other DNA
aagcacttgtaaaac

SEQ ID NO: 40 - DNA, 15 bp, synthetic construct
  source 1..15: mol_type = other DNA
ggttctttcctaccc

SEQ ID NO: 41 - DNA, 15 bp, synthetic construct
  source 1..15: mol_type = other DNA
tttgccgagatattt

SEQ ID NO: 42 - DNA, 15 bp, synthetic construct
  source 1..15: mol_type = other DNA
ccttacattcatgtt

SEQ ID NO: 43 - DNA, 15 bp, synthetic construct
  source 1..15: mol_type = other DNA
cagataaatcacttg

SEQ ID NO: 44 - DNA, 15 bp, synthetic construct
  source 1..15: mol_type = other DNA
ttcaatgctccctct

SEQ ID NO: 45 - DNA, 15 bp, synthetic construct
  source 1..15: mol_type = other DNA
ctttcagccaggtaa

SEQ ID NO: 46 - DNA, 15 bp, synthetic construct
  source 1..15: mol_type = other DNA
gcacaaggagtgtgt

SEQ ID NO: 47 - DNA, 15 bp, synthetic construct
  source 1..15: mol_type = other DNA
tccgtatagcccagg

SEQ ID NO: 48 - DNA, 15 bp, synthetic construct
  source 1..15: mol_type = other DNA
tgtatacactctgta

SEQ ID NO: 49 - DNA, 15 bp, synthetic construct
  source 1..15: mol_type = other DNA
agagccaaggactaa

SEQ ID NO: 50 - DNA, 15 bp, synthetic construct
  source 1..15: mol_type = other DNA
gtgtccagatgagaa

SEQ ID NO: 51 - DNA, 15 bp, synthetic construct
  source 1..15: mol_type = other DNA
tgacttgagttctca

SEQ ID NO: 52 - DNA, 15 bp, synthetic construct
  source 1..15: mol_type = other DNA
ttcacaccataggaa

SEQ ID NO: 53 - DNA, 15 bp, synthetic construct
  source 1..15: mol_type = other DNA
aacccaatggcaaca

SEQ ID NO: 54 - DNA, 15 bp, synthetic construct
  source 1..15: mol_type = other DNA
caccggaagagtctc

SEQ ID NO: 55 - DNA, 15 bp, synthetic construct
  source 1..15: mol_type = other DNA
acaggctacagtgtg

SEQ ID NO: 56 - DNA, 15 bp, synthetic construct
  source 1..15: mol_type = other DNA
tgcagagtcatccag

SEQ ID NO: 57 - DNA, 15 bp, synthetic construct
  source 1..15: mol_type = other DNA
acaggatattcatcc

SEQ ID NO: 58 - DNA, 15 bp, synthetic construct
  source 1..15: mol_type = other DNA
acagcttggacctca

SEQ ID NO: 59 - DNA, 15 bp, synthetic construct
  source 1..15: mol_type = other DNA
aagcatgaagaggac

SEQ ID NO: 60 - DNA, 15 bp, synthetic construct
  source 1..15: mol_type = other DNA
taattcaggttgaca

SEQ ID NO: 61 - DNA, 15 bp, synthetic construct
  source 1..15: mol_type = other DNA
ggtgcagagtccacc

SEQ ID NO: 62 - DNA, 15 bp, synthetic construct
  source 1..15: mol_type = other DNA
aattgccagggcttc

SEQ ID NO: 63 - DNA, 15 bp, synthetic construct
  source 1..15: mol_type = other DNA
tcagaatcaaaagga

SEQ ID NO: 64 - DNA, 15 bp, synthetic construct
  source 1..15: mol_type = other DNA
tttgcaaattctctg

SEQ ID NO: 65 - DNA, 15 bp, synthetic construct
  source 1..15: mol_type = other DNA
catgagtgtccttgc

SEQ ID NO: 66 - DNA, 15 bp, synthetic construct
  source 1..15: mol_type = other DNA
aatgatagtctgagg

SEQ ID NO: 67 - DNA, 15 bp, synthetic construct
  source 1..15: mol_type = other DNA
gagtgcgatgctttc

SEQ ID NO: 68 - DNA, 15 bp, synthetic construct
  source 1..15: mol_type = other DNA
attaacagcccaaaa

SEQ ID NO: 69 - DNA, 15 bp, synthetic construct
  source 1..15: mol_type = other DNA
atgttcctaggtagc

SEQ ID NO: 70 - DNA, 15 bp, synthetic construct
  source 1..15: mol_type = other DNA
gagcagttttacctt

SEQ ID NO: 71 - DNA, 15 bp, synthetic construct
  source 1..15: mol_type = other DNA
aaactgcattccaga

SEQ ID NO: 72 - DNA, 15 bp, synthetic construct
  source 1..15: mol_type = other DNA
aaacagatgatccag

SEQ ID NO: 73 - DNA, 15 bp, synthetic construct
  source 1..15: mol_type = other DNA
ggtatgctcagcaag

SEQ ID NO: 74 - DNA, 15 bp, synthetic construct
  source 1..15: mol_type = other DNA
gaagttattttgcac

SEQ ID NO: 75 - DNA, 15 bp, synthetic construct
  source 1..15: mol_type = other DNA
tcggcagaacttgac

SEQ ID NO: 76 - DNA, 15 bp, synthetic construct
  source 1..15: mol_type = other DNA
ttccaaagccatggc

SEQ ID NO: 77 - DNA, 15 bp, synthetic construct
  source 1..15: mol_type = other DNA
tcttcgttacagcag

SEQ ID NO: 78 - DNA, 15 bp, synthetic construct
  source 1..15: mol_type = other DNA
ataagcaccactgca

SEQ ID NO: 79 - DNA, 15 bp, synthetic construct
  source 1..15: mol_type = other DNA
acgaaaactattgtg

SEQ ID NO: 80 - DNA, 15 bp, synthetic construct
  source 1..15: mol_type = other DNA
tgcgtttgctcatgt

SEQ ID NO: 81 - DNA, 15 bp, synthetic construct
  source 1..15: mol_type = other DNA
tgcagatctctagca

SEQ ID NO: 82 - DNA, 15 bp, synthetic construct
  source 1..15: mol_type = other DNA
aatctgctacagcca

SEQ ID NO: 83 - DNA, 15 bp, synthetic construct
  source 1..15: mol_type = other DNA
gtctgagatttgagt

SEQ ID NO: 84 - DNA, 15 bp, synthetic construct
  source 1..15: mol_type = other DNA
ggtagacttgtataa

SEQ ID NO: 85 - DNA, 15 bp, synthetic construct
  source 1..15: mol_type = other DNA
ctgtgcttcgtcacc

SEQ ID NO: 86 - DNA, 15 bp, synthetic construct
  source 1..15: mol_type = other DNA
tgggaaaacagccct

SEQ ID NO: 87 - DNA, 15 bp, synthetic construct
  source 1..15: mol_type = other DNA
ctgcttcacaggatt

SEQ ID NO: 88 - DNA, 15 bp, synthetic construct
  source 1..15: mol_type = other DNA
atttccgatggtgat

SEQ ID NO: 89 - DNA, 15 bp, synthetic construct
  source 1..15: mol_type = other DNA
cattgtagaaagagt

SEQ ID NO: 90 - DNA, 15 bp, synthetic construct
  source 1..15: mol_type = other DNA
ccacgctcagtcagg

SEQ ID NO: 91 - DNA, 15 bp, synthetic construct
  source 1..15: mol_type = other DNA
gaatccaggacgatg

SEQ ID NO: 92 - DNA, 15 bp, synthetic construct
  source 1..15: mol_type = other DNA
actattgcatggatt

SEQ ID NO: 93 - DNA, 15 bp, synthetic construct
  source 1..15: mol_type = other DNA
ctgacctgtgtttag

SEQ ID NO: 94 - DNA, 15 bp, synthetic construct
  source 1..15: mol_type = other DNA
gaatgagggcaagag

SEQ ID NO: 95 - DNA, 15 bp, synthetic construct
  source 1..15: mol_type = other DNA
ggcatgaataccaga

SEQ ID NO: 96 - DNA, 15 bp, synthetic construct
  source 1..15: mol_type = other DNA
tcgcaagtccttgac

SEQ ID NO: 97 - DNA, 15 bp, synthetic construct
  source 1..15: mol_type = other DNA
aagtcttgacaggga

SEQ ID NO: 98 - DNA, 15 bp, synthetic construct
  source 1..15: mol_type = other DNA
tgtcaacaacgctgt

SEQ ID NO: 99 - DNA, 15 bp, synthetic construct
  source 1..15: mol_type = other DNA
tgagacatagcccag

SEQ ID NO: 100 - DNA, 15 bp, synthetic construct
  source 1..15: mol_type = other DNA
catgaggtagtccgt

SEQ ID NO: 101 - DNA, 15 bp, synthetic construct
  source 1..15: mol_type = other DNA
ccttttgtctccctc

SEQ ID NO: 102 - DNA, 15 bp, synthetic construct
  source 1..15: mol_type = other DNA
aaagatgatcgcggg

SEQ ID NO: 103 - DNA, 15 bp, synthetic construct
  source 1..15: mol_type = other DNA
ttggcatataagtcc

SEQ ID NO: 104 - DNA, 15 bp, synthetic construct
  source 1..15: mol_type = other DNA
ctgttctgactttag

SEQ ID NO: 105 - DNA, 15 bp, synthetic construct
  source 1..15: mol_type = other DNA
tggctgtttgcctct

SEQ ID NO: 106 - DNA, 15 bp, synthetic construct
  source 1..15: mol_type = other DNA
gcctaggttggagaa

SEQ ID NO: 107 - DNA, 15 bp, synthetic construct
  source 1..15: mol_type = other DNA
cagcggactccatgc

SEQ ID NO: 108 - DNA, 15 bp, synthetic construct
  source 1..15: mol_type = other DNA
gatccctcgcttgct

SEQ ID NO: 109 - DNA, 15 bp, synthetic construct
  source 1..15: mol_type = other DNA
ctggcttcttacctg

SEQ ID NO: 110 - DNA, 15 bp, synthetic construct
  source 1..15: mol_type = other DNA
cattgtagaaggagt

SEQ ID NO: 111 - DNA, 15 bp, synthetic construct
  source 1..15: mol_type = other DNA
caatttctctctcag

SEQ ID NO: 112 - DNA, 15 bp, synthetic construct
  source 1..15: mol_type = other DNA
tcgagcatgtcagct

SEQ ID NO: 113 - DNA, 15 bp, synthetic construct
  source 1..15: mol_type = other DNA
ggcttcattgaagct

SEQ ID NO: 114 - DNA, 15 bp, synthetic construct
  source 1..15: mol_type = other DNA
agcatccatgttgca

SEQ ID NO: 115 - DNA, 15 bp, synthetic construct
  source 1..15: mol_type = other DNA
tcacagtcatcccta

SEQ ID NO: 116 - DNA, 15 bp, synthetic construct
  source 1..15: mol_type = other DNA
aacctcatatctatc

SEQ ID NO: 117 - DNA, 15 bp, synthetic construct
  source 1..15: mol_type = other DNA
aggtggagtcattgt

SEQ ID NO: 118 - DNA, 15 bp, synthetic construct
  source 1..15: mol_type = other DNA
attacgctctccttc

SEQ ID NO: 119 - DNA, 15 bp, synthetic construct
  source 1..15: mol_type = other DNA
tctgataacagtgtc

SEQ ID NO: 120 - DNA, 15 bp, synthetic construct
  source 1..15: mol_type = other DNA
aggattgatatgagc

SEQ ID NO: 121 - DNA, 15 bp, synthetic construct
  source 1..15: mol_type = other DNA
tacctctacataccc

SEQ ID NO: 122 - DNA, 15 bp, synthetic construct
  source 1..15: mol_type = other DNA
catgatgtccattta

SEQ ID NO: 123 - DNA, 15 bp, synthetic construct
  source 1..15: mol_type = other DNA
ctcaaggagacaatg

SEQ ID NO: 124 - DNA, 15 bp, synthetic construct
  source 1..15: mol_type = other DNA
ttaggaccaataaga

SEQ ID NO: 125 - DNA, 15 bp, synthetic construct
  source 1..15: mol_type = other DNA
tgatcagttggtgtc

SEQ ID NO: 126 - DNA, 15 bp, synthetic construct
  source 1..15: mol_type = other DNA
ctgtgatgtggtagg

SEQ ID NO: 127 - DNA, 15 bp, synthetic construct
  source 1..15: mol_type = other DNA
ggtcatgaccgggca

SEQ ID NO: 128 - DNA, 15 bp, synthetic construct
  source 1..15: mol_type = other DNA
gtgtagcacctgagg

SEQ ID NO: 129 - DNA, 15 bp, synthetic construct
  source 1..15: mol_type = other DNA
gcacacaactcagcc

SEQ ID NO: 130 - DNA, 15 bp, synthetic construct
  source 1..15: mol_type = other DNA
ccactttctctgagg

SEQ ID NO: 131 - DNA, 15 bp, synthetic construct
  source 1..15: mol_type = other DNA
acatacagaaaaggg

SEQ ID NO: 132 - DNA, 15 bp, synthetic construct
  source 1..15: mol_type = other DNA
agatggagttggctt

SEQ ID NO: 133 - DNA, 15 bp, synthetic construct
  source 1..15: mol_type = other DNA
taattctgggtagat

SEQ ID NO: 134 - DNA, 15 bp, synthetic construct
  source 1..15: mol_type = other DNA
acagactgcagtcag

SEQ ID NO: 135 - DNA, 15 bp, synthetic construct
  source 1..15: mol_type = other DNA
gaagcacagtccttc

SEQ ID NO: 136 - DNA, 15 bp, synthetic construct
  source 1..15: mol_type = other DNA
atagcactgtcaact

SEQ ID NO: 137 - DNA, 15 bp, synthetic construct
  source 1..15: mol_type = other DNA
gaaactcatgaaagc

SEQ ID NO: 138 - DNA, 15 bp, synthetic construct
  source 1..15: mol_type = other DNA
cagtcagaatggaag

SEQ ID NO: 139 - DNA, 15 bp, synthetic construct
  source 1..15: mol_type = other DNA
aactgtgacgagtaa

SEQ ID NO: 140 - DNA, 15 bp, synthetic construct
  source 1..15: mol_type = other DNA
tgtgtacaatctgtt

SEQ ID NO: 141 - DNA, 15 bp, synthetic construct
  source 1..15: mol_type = other DNA
gcccatcaggtgata

SEQ ID NO: 142 - DNA, 15 bp, synthetic construct
  source 1..15: mol_type = other DNA
ctctaactgttaaag

SEQ ID NO: 143 - DNA, 15 bp, synthetic construct
  source 1..15: mol_type = other DNA
gtgatgtcatctccc

SEQ ID NO: 144 - DNA, 15 bp, synthetic construct
  source 1..15: mol_type = other DNA
atagctctgactgaa

SEQ ID NO: 145 - DNA, 15 bp, synthetic construct
  source 1..15: mol_type = other DNA
gtgatgaataaccat

SEQ ID NO: 146 - DNA, 15 bp, synthetic construct
  source 1..15: mol_type = other DNA
ctgtttgagatcatt

SEQ ID NO: 147 - DNA, 15 bp, synthetic construct
  source 1..15: mol_type = other DNA
agcatcatgtcttct

SEQ ID NO: 148 - DNA, 15 bp, synthetic construct
  source 1..15: mol_type = other DNA
gaaatgtattctgga

SEQ ID NO: 149 - DNA, 15 bp, synthetic construct
  source 1..15: mol_type = other DNA
gatgacagtggtcca

SEQ ID NO: 150 - DNA, 15 bp, synthetic construct
  source 1..15: mol_type = other DNA
accgtccttgatccc

SEQ ID NO: 151 - DNA, 15 bp, synthetic construct
  source 1..15: mol_type = other DNA
cagaaagagcacttc

SEQ ID NO: 152 - DNA, 15 bp, synthetic construct
  source 1..15: mol_type = other DNA
aacgtctttccatct

SEQ ID NO: 153 - DNA, 15 bp, synthetic construct
  source 1..15: mol_type = other DNA
aagcgatgctgcatg

SEQ ID NO: 154 - DNA, 15 bp, synthetic construct
  source 1..15: mol_type = other DNA
aaactcgttcatggt

SEQ ID NO: 155 - DNA, 15 bp, synthetic construct
  source 1..15: mol_type = other DNA
acagttccctggacc

SEQ ID NO: 156 - DNA, 15 bp, synthetic construct
  source 1..15: mol_type = other DNA
ggtgacagacagccc

SEQ ID NO: 157 - DNA, 15 bp, synthetic construct
  source 1..15: mol_type = other DNA
agcttctcatggtcc

SEQ ID NO: 158 - DNA, 15 bp, synthetic construct
  source 1..15: mol_type = other DNA
aggtgccatcattct

SEQ ID NO: 159 - DNA, 15 bp, synthetic construct
  source 1..15: mol_type = other DNA
atctggtgccaccag

SEQ ID NO: 160 - DNA, 15 bp, synthetic construct
  source 1..15: mol_type = other DNA
caaactggatgaaat

SEQ ID NO: 161 - DNA, 15 bp, synthetic construct
  source 1..15: mol_type = other DNA
cgtcgctcatggtgc

SEQ ID NO: 162 - DNA, 15 bp, synthetic construct
  source 1..15: mol_type = other DNA
caaaatacctggtgt

SEQ ID NO: 163 - DNA, 15 bp, synthetic construct
  source 1..15: mol_type = other DNA
tccagcgcagtccac

SEQ ID NO: 164 - DNA, 15 bp, synthetic construct
  source 1..15: mol_type = other DNA
cttgtccagcatgag

SEQ ID NO: 165 - DNA, 15 bp, synthetic construct
  source 1..15: mol_type = other DNA
ctgccaagtgtcaaa

SEQ ID NO: 166 - DNA, 15 bp, synthetic construct
  source 1..15: mol_type = other DNA
tcttgaggatcttca

SEQ ID NO: 167 - DNA, 15 bp, synthetic construct
  source 1..15: mol_type = other DNA
ggagcctcacgttgg

SEQ ID NO: 168 - DNA, 15 bp, synthetic construct
  source 1..15: mol_type = other DNA
ctccgagtgcaggta

SEQ ID NO: 169 - DNA, 15 bp, synthetic construct
  source 1..15: mol_type = other DNA
aagcttctcatggtc

SEQ ID NO: 170 - DNA, 15 bp, synthetic construct
  source 1..15: mol_type = other DNA
tcagcgccatagaag

SEQ ID NO: 171 - DNA, 15 bp, synthetic construct
  source 1..15: mol_type = other DNA
agtccttaacatttc

SEQ ID NO: 172 - DNA, 15 bp, synthetic construct
  source 1..15: mol_type = other DNA
caaatgcacccgaga

SEQ ID NO: 173 - DNA, 15 bp, synthetic construct
  source 1..15: mol_type = other DNA
caatttctgagagct

SEQ ID NO: 174 - DNA, 15 bp, synthetic construct
  source 1..15: mol_type = other DNA
aaaaggatcacaccc

SEQ ID NO: 175 - DNA, 15 bp, synthetic construct
  source 1..15: mol_type = other DNA
ccaccttgatcctct

SEQ ID NO: 176 - DNA, 15 bp, synthetic construct
  source 1..15: mol_type = other DNA
taggaatgaagaatg

SEQ ID NO: 177 - DNA, 15 bp, synthetic construct
  source 1..15: mol_type = other DNA
tggatagcgaggctg

SEQ ID NO: 178 - DNA, 15 bp, synthetic construct
  source 1..15: mol_type = other DNA
ctagatatcaaaagc

SEQ ID NO: 179 - DNA, 15 bp, synthetic construct
  source 1..15: mol_type = other DNA
tcaagtctcgtggtc

SEQ ID NO: 180 - DNA, 15 bp, synthetic construct
  source 1..15: mol_type = other DNA
ttcagcacagtctct

SEQ ID NO: 181 - DNA, 15 bp, synthetic construct
  source 1..15: mol_type = other DNA
tgctgcttctgaaga

SEQ ID NO: 182 - DNA, 15 bp, synthetic construct
  source 1..15: mol_type = other DNA
atctgcggagtgtat

SEQ ID NO: 183 - DNA, 15 bp, synthetic construct
  source 1..15: mol_type = other DNA
gtccctgtaagtcct

SEQ ID NO: 184 - DNA, 15 bp, synthetic construct
  source 1..15: mol_type = other DNA
ctgaagggttaccaa

SEQ ID NO: 185 - DNA, 15 bp, synthetic construct
  source 1..15: mol_type = other DNA
tccagtagcaaacct

SEQ ID NO: 186 - DNA, 15 bp, synthetic construct
  source 1..15: mol_type = other DNA
tgaactgtgctccct

SEQ ID NO: 187 - DNA, 15 bp, synthetic construct
  source 1..15: mol_type = other DNA
attgtccacccgcct

SEQ ID NO: 188 - DNA, 15 bp, synthetic construct
  source 1..15: mol_type = other DNA
gattagtcagttgcg

SEQ ID NO: 189 - DNA, 15 bp, synthetic construct
  source 1..15: mol_type = other DNA
tgccattcgtggtgt

SEQ ID NO: 190 - DNA, 15 bp, synthetic construct
  source 1..15: mol_type = other DNA
ttgtgcagaagttgc

SEQ ID NO: 191 - DNA, 15 bp, synthetic construct
  source 1..15: mol_type = other DNA
gtttgctccgctgtt

SEQ ID NO: 192 - DNA, 15 bp, synthetic construct
  source 1..15: mol_type = other DNA
gtattcgagcggcgc

SEQ ID NO: 193 - DNA, 15 bp, synthetic construct
  source 1..15: mol_type = other DNA
tttagcaacagtggg

SEQ ID NO: 194 - DNA, 15 bp, synthetic construct
  source 1..15: mol_type = other DNA
ccattgtgcaaaaag

SEQ ID NO: 195 - DNA, 15 bp, synthetic construct
  source 1..15: mol_type = other DNA
cgtctggttctgtac

SEQ ID NO: 196 - DNA, 15 bp, synthetic construct
  source 1..15: mol_type = other DNA
cctttgtgctaaaat

SEQ ID NO: 197 - DNA, 15 bp, synthetic construct
  source 1..15: mol_type = other DNA
gtggcagtcactatt

SEQ ID NO: 198 - DNA, 15 bp, synthetic construct
  source 1..15: mol_type = other DNA
tttgcataggtgttc

SEQ ID NO: 199 - DNA, 15 bp, synthetic construct
  source 1..15: mol_type = other DNA
atagctagcaccttc

SEQ ID NO: 200 - DNA, 15 bp, synthetic construct
  source 1..15: mol_type = other DNA
cctgtagctgatctt

SEQ ID NO: 201 - DNA, 15 bp, synthetic construct
  source 1..15: mol_type = other DNA
cagagtcccgagctg

SEQ ID NO: 202 - DNA, 15 bp, synthetic construct
  source 1..15: mol_type = other DNA
tatccgaatcaatca

SEQ ID NO: 203 - DNA, 15 bp, synthetic construct
  source 1..15: mol_type = other DNA
ttaatgtttccactg

SEQ ID NO: 204 - DNA, 15 bp, synthetic construct
  source 1..15: mol_type = other DNA
catcaggagtgtggt

SEQ ID NO: 205 - DNA, 15 bp, synthetic construct
  source 1..15: mol_type = other DNA
acataacgcccacat

SEQ ID NO: 206 - DNA, 15 bp, synthetic construct
  source 1..15: mol_type = other DNA
taagctagacacctc

SEQ ID NO: 207 - DNA, 15 bp, synthetic construct
  source 1..15: mol_type = other DNA
tttgctccgtgcttc

SEQ ID NO: 208 - DNA, 15 bp, synthetic construct
  source 1..15: mol_type = other DNA
ggcagttgtacctga

SEQ ID NO: 209 - DNA, 15 bp, synthetic construct
  source 1..15: mol_type = other DNA
ccgtacgctgtctct

SEQ ID NO: 210 - DNA, 15 bp, synthetic construct
  source 1..15: mol_type = other DNA
agtggttggcttgaa

SEQ ID NO: 211 - DNA, 15 bp, synthetic construct
  source 1..15: mol_type = other DNA
aataatgctgttgtg

SEQ ID NO: 212 - DNA, 15 bp, synthetic construct
  source 1..15: mol_type = other DNA
cagagcgtagctctt

SEQ ID NO: 213 - DNA, 15 bp, synthetic construct
  source 1..15: mol_type = other DNA
ccaccttagagttta

SEQ ID NO: 214 - DNA, 15 bp, synthetic construct
  source 1..15: mol_type = other DNA
ctaactgaattgtca

SEQ ID NO: 215 - DNA, 15 bp, synthetic construct
  source 1..15: mol_type = other DNA
actggcagccaacag

SEQ ID NO: 216 - DNA, 15 bp, synthetic construct
  source 1..15: mol_type = other DNA
caagctactggcttc

SEQ ID NO: 217 - DNA, 15 bp, synthetic construct
  source 1..15: mol_type = other DNA
agtggtatctgccag

SEQ ID NO: 218 - DNA, 15 bp, synthetic construct
  source 1..15: mol_type = other DNA
cttgctgaggacaga

SEQ ID NO: 219 - DNA, 15 bp, synthetic construct
  source 1..15: mol_type = other DNA
gccagcagtaatcga

SEQ ID NO: 220 - DNA, 15 bp, synthetic construct
  source 1..15: mol_type = other DNA
agcacggtgttggaa

SEQ ID NO: 221 - DNA, 15 bp, synthetic construct
  source 1..15: mol_type = other DNA
tctgtgaacatgcca

SEQ ID NO: 222 - DNA, 15 bp, synthetic construct
  source 1..15: mol_type = other DNA
tagctctttctggga

SEQ ID NO: 223 - DNA, 15 bp, synthetic construct
  source 1..15: mol_type = other DNA
agttccctcacacag

SEQ ID NO: 224 - DNA, 15 bp, synthetic construct
  source 1..15: mol_type = other DNA
accatgagaagtcca

SEQ ID NO: 225 - DNA, 15 bp, synthetic construct
  source 1..15: mol_type = other DNA
gaaggtcagcttttc

SEQ ID NO: 226 - DNA, 15 bp, synthetic construct
  source 1..15: mol_type = other DNA
ggcatttagacacca

SEQ ID NO: 227 - DNA, 15 bp, synthetic construct
  source 1..15: mol_type = other DNA
ttcctatgctgctct

SEQ ID NO: 228 - DNA, 15 bp, synthetic construct
  source 1..15: mol_type = other DNA
ctcttgcacactcag

SEQ ID NO: 229 - DNA, 15 bp, synthetic construct
  source 1..15: mol_type = other DNA
gggaatcctgtgcag

SEQ ID NO: 230 - DNA, 15 bp, synthetic construct
  source 1..15: mol_type = other DNA
tgctggccacgtaaa

SEQ ID NO: 231 - DNA, 15 bp, synthetic construct
  source 1..15: mol_type = other DNA
tgatgggaacctctg

SEQ ID NO: 232 - DNA, 15 bp, synthetic construct
  source 1..15: mol_type = other DNA
taaacacacatcctt

SEQ ID NO: 233 - DNA, 15 bp, synthetic construct
  source 1..15: mol_type = other DNA
ttatatcggcaccag

SEQ ID NO: 234 - DNA, 15 bp, synthetic construct
  source 1..15: mol_type = other DNA
cttttttctcccatg

SEQ ID NO: 235 - DNA, 15 bp, synthetic construct
  source 1..15: mol_type = other DNA
cttgggtacacacac

SEQ ID NO: 236 - DNA, 15 bp, synthetic construct
  source 1..15: mol_type = other DNA
ttcattctgcaggga

SEQ ID NO: 237 - DNA, 15 bp, synthetic construct
  source 1..15: mol_type = other DNA
tttcattccgcaggt

SEQ ID NO: 238 - DNA, 15 bp, synthetic construct
  source 1..15: mol_type = other DNA
tgtgagtaaagatct

SEQ ID NO: 239 - DNA, 15 bp, synthetic construct
  source 1..15: mol_type = other DNA
taggagtcgttgctg

SEQ ID NO: 240 - DNA, 15 bp, synthetic construct
  source 1..15: mol_type = other DNA
ttttcttgatgtcac

SEQ ID NO: 241 - DNA, 15 bp, synthetic construct
  source 1..15: mol_type = other DNA
ttaaggttgatggtc

SEQ ID NO: 242 - DNA, 15 bp, synthetic construct
  source 1..15: mol_type = other DNA
tgatgggagtatctc

SEQ ID NO: 243 - DNA, 15 bp, synthetic construct
  source 1..15: mol_type = other DNA
tgtgttcagcttcct

SEQ ID NO: 244 - DNA, 15 bp, synthetic construct
  source 1..15: mol_type = other DNA
gtgggaacatcggat

SEQ ID NO: 245 - DNA, 15 bp, synthetic construct
  source 1..15: mol_type = other DNA
ttagggtcatctgaa

SEQ ID NO: 246 - DNA, 15 bp, synthetic construct
  source 1..15: mol_type = other DNA
tgcagttactccaca

SEQ ID NO: 247 - DNA, 15 bp, synthetic construct
  source 1..15: mol_type = other DNA
ttctcagatgtttct

SEQ ID NO: 248 - DNA, 15 bp, synthetic construct
  source 1..15: mol_type = other DNA
aacattttgctgaag

SEQ ID NO: 249 - DNA, 15 bp, synthetic construct
  source 1..15: mol_type = other DNA
ccacgcatccagtct

SEQ ID NO: 250 - DNA, 15 bp, synthetic construct
  source 1..15: mol_type = other DNA
ttttgcaggactcgt

SEQ ID NO: 251 - DNA, 15 bp, synthetic construct
  source 1..15: mol_type = other DNA
gctgatgaagacaaa

SEQ ID NO: 252 - DNA, 15 bp, synthetic construct
  source 1..15: mol_type = other DNA
aggaaaagaaggagg

SEQ ID NO: 253 - DNA, 15 bp, synthetic construct
  source 1..15: mol_type = other DNA
gaatcagcctcgtgg

SEQ ID NO: 254 - DNA, 15 bp, synthetic construct
  source 1..15: mol_type = other DNA
ttcattctgcaatag

SEQ ID NO: 255 - DNA, 15 bp, synthetic construct
  source 1..15: mol_type = other DNA
aaaaggtgggaaggc

SEQ ID NO: 256 - DNA, 15 bp, synthetic construct
  source 1..15: mol_type = other DNA
aagggccttctggtt

SEQ ID NO: 257 - DNA, 15 bp, synthetic construct
  source 1..15: mol_type = other DNA
atatgcagagcagac

SEQ ID NO: 258 - DNA, 15 bp, synthetic construct
  source 1..15: mol_type = other DNA
cctcagtttctttat

SEQ ID NO: 259 - DNA, 15 bp, synthetic construct
  source 1..15: mol_type = other DNA
agtccagaacattcc

SEQ ID NO: 260 - DNA, 15 bp, synthetic construct
  source 1..15: mol_type = other DNA
tacggtagaatccca

SEQ ID NO: 261 - DNA, 15 bp, synthetic construct
  source 1..15: mol_type = other DNA
ttcctgctagggaat

SEQ ID NO: 262 - DNA, 15 bp, synthetic construct
  source 1..15: mol_type = other DNA
tggccaaatcattgt

SEQ ID NO: 263 - DNA, 15 bp, synthetic construct
  source 1..15: mol_type = other DNA
taaattccagggctg

SEQ ID NO: 264 - DNA, 15 bp, synthetic construct
  source 1..15: mol_type = other DNA
gtcaggcagtaagtc

SEQ ID NO: 265 - DNA, 15 bp, synthetic construct
  source 1..15: mol_type = other DNA
caactacctggctgt

SEQ ID NO: 266 - DNA, 15 bp, synthetic construct
  source 1..15: mol_type = other DNA
ctaagtgcacagtgg

SEQ ID NO: 267 - DNA, 15 bp, synthetic construct
  source 1..15: mol_type = other DNA
ggtccctttctttca

SEQ ID NO: 268 - DNA, 15 bp, synthetic construct
  source 1..15: mol_type = other DNA
atacctgcgtaattg

SEQ ID NO: 269 - DNA, 15 bp, synthetic construct
  source 1..15: mol_type = other DNA
gtaaatcttggtccc

SEQ ID NO: 270 - DNA, 15 bp, synthetic construct
  source 1..15: mol_type = other DNA
ttgtagcctgtctgc

SEQ ID NO: 271 - DNA, 15 bp, synthetic construct
  source 1..15: mol_type = other DNA
agctacctcattagg

SEQ ID NO: 272 - DNA, 15 bp, synthetic construct
  source 1..15: mol_type = other DNA
gctcaaatgcctctg

SEQ ID NO: 273 - DNA, 15 bp, synthetic construct
  source 1..15: mol_type = other DNA
gggagtagagaactg

SEQ ID NO: 274 - DNA, 15 bp, synthetic construct
  source 1..15: mol_type = other DNA
catgctgtgtttgca

SEQ ID NO: 275 - DNA, 15 bp, synthetic construct
  source 1..15: mol_type = other DNA
ctctctttctcaagg

SEQ ID NO: 276 - DNA, 15 bp, synthetic construct
  source 1..15: mol_type = other DNA
cagtgacgacagctg

SEQ ID NO: 277 - DNA, 15 bp, synthetic construct
  source 1..15: mol_type = other DNA
agccggtgtaatgga

SEQ ID NO: 278 - DNA, 15 bp, synthetic construct
  source 1..15: mol_type = other DNA
agaactggaagcagc

SEQ ID NO: 279 - DNA, 15 bp, synthetic construct
  source 1..15: mol_type = other DNA
gtaagaagaggttaa

SEQ ID NO: 280 - DNA, 15 bp, synthetic construct
  source 1..15: mol_type = other DNA
tacctttgtcacggg

SEQ ID NO: 281 - DNA, 15 bp, synthetic construct
  source 1..15: mol_type = other DNA
cacggcagggttcag

SEQ ID NO: 282 - DNA, 15 bp, synthetic construct
  source 1..15: mol_type = other DNA
gcacacacacgataa

SEQ ID NO: 283 - DNA, 15 bp, synthetic construct
  source 1..15: mol_type = other DNA
ccaggttgatggtga

SEQ ID NO: 284 - DNA, 15 bp, synthetic construct
  source 1..15: mol_type = other DNA
tggttgtcggcgaag

SEQ ID NO: 285 - DNA, 15 bp, synthetic construct
  source 1..15: mol_type = other DNA
atgccggctgtgcca

SEQ ID NO: 286 - DNA, 15 bp, synthetic construct
  source 1..15: mol_type = other DNA
actattccagcaccc

SEQ ID NO: 287 - DNA, 15 bp, synthetic construct
  source 1..15: mol_type = other DNA
agggccaaaagagcg

SEQ ID NO: 288 - DNA, 15 bp, synthetic construct
  source 1..15: mol_type = other DNA
cccactctaaacacc

SEQ ID NO: 289 - DNA, 15 bp, synthetic construct
  source 1..15: mol_type = other DNA
gccagtgaagtagat

SEQ ID NO: 290 - DNA, 15 bp, synthetic construct
  source 1..15: mol_type = other DNA
taaggcggcattcaa

SEQ ID NO: 291 - DNA, 15 bp, synthetic construct
  source 1..15: mol_type = other DNA
tgcaggatggtaggc

SEQ ID NO: 292 - DNA, 15 bp, synthetic construct
  source 1..15: mol_type = other DNA
gatggccacacgctc

SEQ ID NO: 293 - DNA, 15 bp, synthetic construct
  source 1..15: mol_type = other DNA
caaaaaggaagcttg

SEQ ID NO: 294 - DNA, 15 bp, synthetic construct
  source 1..15: mol_type = other DNA
gaagaccttgcagct

SEQ ID NO: 295 - DNA, 15 bp, synthetic construct
  source 1..15: mol_type = other DNA
ctggttgttgtcgtg

SEQ ID NO: 296 - DNA, 15 bp, synthetic construct
  source 1..15: mol_type = other DNA
ttccaaggacagcac

SEQ ID NO: 297 - DNA, 15 bp, synthetic construct
  source 1..15: mol_type = other DNA
tgccttttcatcttt

SEQ ID NO: 298 - DNA, 15 bp, synthetic construct
  source 1..15: mol_type = other DNA
gtgacactgtcagct

SEQ ID NO: 299 - DNA, 15 bp, synthetic construct
  source 1..15: mol_type = other DNA
gatggacaatttttc

SEQ ID NO: 300 - DNA, 15 bp, synthetic construct
  source 1..15: mol_type = other DNA
tatcttcagtgctct

SEQ ID NO: 301 - DNA, 15 bp, synthetic construct
  source 1..15: mol_type = other DNA
acctttgcattcggc

SEQ ID NO: 302 - DNA, 15 bp, synthetic construct
  source 1..15: mol_type = other DNA
cgtgcagcctaacca

SEQ ID NO: 303 - DNA, 15 bp, synthetic construct
  source 1..15: mol_type = other DNA
cccagttcattgagg

SEQ ID NO: 304 - DNA, 15 bp, synthetic construct
  source 1..15: mol_type = other DNA
gacttgtgcatgcgg

SEQ ID NO: 305 - DNA, 15 bp, synthetic construct
  source 1..15: mol_type = other DNA
gcccatggcaaacac

SEQ ID NO: 306 - DNA, 15 bp, synthetic construct
  source 1..15: mol_type = other DNA
aggtgcctcattcgg

SEQ ID NO: 307 - DNA, 15 bp, synthetic construct
  source 1..15: mol_type = other DNA
ccagaagcttcatct

SEQ ID NO: 308 - DNA, 15 bp, synthetic construct
  source 1..15: mol_type = other DNA
ataggagccacaatg

SEQ ID NO: 309 - DNA, 15 bp, synthetic construct
  source 1..15: mol_type = other DNA
tccagtgagtgatcc

SEQ ID NO: 310 - DNA, 15 bp, synthetic construct
  source 1..15: mol_type = other DNA
ggatgtgggattttt

SEQ ID NO: 311 - DNA, 15 bp, synthetic construct
  source 1..15: mol_type = other DNA
gttacctctctgcaa

SEQ ID NO: 312 - DNA, 15 bp, synthetic construct
  source 1..15: mol_type = other DNA
ggcgaagtagagcat

SEQ ID NO: 313 - DNA, 15 bp, synthetic construct
  source 1..15: mol_type = other DNA
cctttggtgtaacct

SEQ ID NO: 314 - DNA, 15 bp, synthetic construct
  source 1..15: mol_type = other DNA
tcttcagcttccggg

SEQ ID NO: 315 - DNA, 15 bp, synthetic construct
  source 1..15: mol_type = other DNA
gtgctttcatgcaca

SEQ ID NO: 316 - DNA, 15 bp, synthetic construct
  source 1..15: mol_type = other DNA
atgacagccatctgg

SEQ ID NO: 317 - DNA, 15 bp, synthetic construct
  source 1..15: mol_type = other DNA
gacacaagtgggact

SEQ ID NO: 318 - DNA, 15 bp, synthetic construct
  source 1..15: mol_type = other DNA
agtccgtcaacatca

SEQ ID NO: 319 - DNA, 15 bp, synthetic construct
  source 1..15: mol_type = other DNA
tagagaccttctctg

SEQ ID NO: 320 - DNA, 15 bp, synthetic construct
  source 1..15: mol_type = other DNA
gggatgtcagcaaag

SEQ ID NO: 321 - DNA, 15 bp, synthetic construct
  source 1..15: mol_type = other DNA
tccatcaccttgcca

SEQ ID NO: 322 - DNA, 15 bp, synthetic construct
  source 1..15: mol_type = other DNA
cagaccttggattct

SEQ ID NO: 323 - DNA, 15 bp, synthetic construct
  source 1..15: mol_type = other DNA
gtcaataggcttgtg

SEQ ID NO: 324 - DNA, 15 bp, synthetic construct
  source 1..15: mol_type = other DNA
gtttccacttgtggt

SEQ ID NO: 325 - DNA, 15 bp, synthetic construct
  source 1..15: mol_type = other DNA
tacagggagtcaccc

SEQ ID NO: 326 - DNA, 15 bp, synthetic construct
  source 1..15: mol_type = other DNA
gtctcctgattccaa

SEQ ID NO: 327 - DNA, 15 bp, synthetic construct
  source 1..15: mol_type = other DNA
tcagtcattgaaaag

SEQ ID NO: 328 - DNA, 15 bp, synthetic construct
  source 1..15: mol_type = other DNA
atggttctggacttg

SEQ ID NO: 329 - DNA, 15 bp, synthetic construct
  source 1..15: mol_type = other DNA
caagccaaggttatt

SEQ ID NO: 330 - DNA, 15 bp, synthetic construct
  source 1..15: mol_type = other DNA
ggccttcttccaccc

SEQ ID NO: 331 - DNA, 15 bp, synthetic construct
  source 1..15: mol_type = other DNA
ctgcacttgagctct

SEQ ID NO: 332 - DNA, 15 bp, synthetic construct
  source 1..15: mol_type = other DNA
tcgagttacttcttc

SEQ ID NO: 333 - DNA, 15 bp, synthetic construct
  source 1..15: mol_type = other DNA
gatatcagtgtgagc

SEQ ID NO: 334 - DNA, 15 bp, synthetic construct
  source 1..15: mol_type = other DNA
ttacaccaagaggga

SEQ ID NO: 335 - DNA, 15 bp, synthetic construct
  source 1..15: mol_type = other DNA
cacgtctgtcggcct

SEQ ID NO: 336 - DNA, 15 bp, synthetic construct
  source 1..15: mol_type = other DNA
gatcacgcctatagt

SEQ ID NO: 337 - DNA, 15 bp, synthetic construct
  source 1..15: mol_type = other DNA
gtcctccaatgtctt

SEQ ID NO: 338 - DNA, 15 bp, synthetic construct
  source 1..15: mol_type = other DNA
aactgtctgttgaat

SEQ ID NO: 339 - DNA, 15 bp, synthetic construct
  source 1..15: mol_type = other DNA
gcttgagccaacagc

SEQ ID NO: 340 - DNA, 15 bp, synthetic construct
  source 1..15: mol_type = other DNA
caatgttgacagctt

SEQ ID NO: 341 - DNA, 15 bp, synthetic construct
  source 1..15: mol_type = other DNA
acagctctgtagtcc

SEQ ID NO: 342 - DNA, 15 bp, synthetic construct
  source 1..15: mol_type = other DNA
atggcattaaagaga

SEQ ID NO: 343 - DNA, 15 bp, synthetic construct
  source 1..15: mol_type = other DNA
aggatctcatcccag

SEQ ID NO: 344 - DNA, 15 bp, synthetic construct
  source 1..15: mol_type = other DNA
ccggaaatactcaaa

SEQ ID NO: 345 - DNA, 15 bp, synthetic construct
  source 1..15: mol_type = other DNA
gcaccttcgagcatg

SEQ ID NO: 346 - DNA, 15 bp, synthetic construct
  source 1..15: mol_type = other DNA
agtcttgctgggtca

SEQ ID NO: 347 - DNA, 15 bp, synthetic construct
  source 1..15: mol_type = other DNA
tcctcatctcagtgt

SEQ ID NO: 348 - DNA, 15 bp, synthetic construct
  source 1..15: mol_type = other DNA
tcagagctgtctcag

SEQ ID NO: 349 - DNA, 15 bp, synthetic construct
  source 1..15: mol_type = other DNA
acaagatctaatacc

SEQ ID NO: 350 - DNA, 15 bp, synthetic construct
  source 1..15: mol_type = other DNA
ggctggtttactgtg

SEQ ID NO: 351 - DNA, 15 bp, synthetic construct
  source 1..15: mol_type = other DNA
ttcatcagcagaatc

SEQ ID NO: 352 - DNA, 15 bp, synthetic construct
  source 1..15: mol_type = other DNA
gacatgcagtcttgg

SEQ ID NO: 353 - DNA, 15 bp, synthetic construct
  source 1..15: mol_type = other DNA
gcccagtgaagaatg

SEQ ID NO: 354 - DNA, 15 bp, synthetic construct
  source 1..15: mol_type = other DNA
cagtgccaaaggagt

SEQ ID NO: 355 - DNA, 15 bp, synthetic construct
  source 1..15: mol_type = other DNA
ttagcagggagcgcc

SEQ ID NO: 356 - DNA, 15 bp, synthetic construct
  source 1..15: mol_type = other DNA
atctaggcaaggaac

SEQ ID NO: 357 - DNA, 15 bp, synthetic construct
  source 1..15: mol_type = other DNA
aggttggatagaggg

SEQ ID NO: 358 - DNA, 15 bp, synthetic construct
  source 1..15: mol_type = other DNA
ttggacctgtagaga

SEQ ID NO: 359 - DNA, 15 bp, synthetic construct
  source 1..15: mol_type = other DNA
tacttcagttcctct

SEQ ID NO: 360 - DNA, 15 bp, synthetic construct
  source 1..15: mol_type = other DNA
ttttctccctcctct

SEQ ID NO: 361 - DNA, 15 bp, synthetic construct
  source 1..15: mol_type = other DNA
tggaatgcgtgggcg

SEQ ID NO: 362 - DNA, 15 bp, synthetic construct
  source 1..15: mol_type = other DNA
ccgtgttcactcctt

SEQ ID NO: 363 - DNA, 15 bp, synthetic construct
  source 1..15: mol_type = other DNA
tagagccgcgttctg

SEQ ID NO: 364 - DNA, 15 bp, synthetic construct
  source 1..15: mol_type = other DNA
ctgcaacccacagtg

SEQ ID NO: 365 - DNA, 15 bp, synthetic construct
  source 1..15: mol_type = other DNA
tgggattgccctgat

SEQ ID NO: 366 - DNA, 15 bp, synthetic construct
  source 1..15: mol_type = other DNA
ctccctgatccaaac

SEQ ID NO: 367 - DNA, 15 bp, synthetic construct
  source 1..15: mol_type = other DNA
catccgtctgctctt

SEQ ID NO: 368 - DNA, 15 bp, synthetic construct
  source 1..15: mol_type = other DNA
ccacaatactgtaca

SEQ ID NO: 369 - DNA, 15 bp, synthetic construct
  source 1..15: mol_type = other DNA
aggagggtcacaagc

SEQ ID NO: 370 - DNA, 15 bp, synthetic construct
  source 1..15: mol_type = other DNA
cttctagtggctcct

SEQ ID NO: 371 - DNA, 15 bp, synthetic construct
  source 1..15: mol_type = other DNA
tcatgtgagtcatat

SEQ ID NO: 372 - DNA, 15 bp, synthetic construct
  source 1..15: mol_type = other DNA
gaggatcttaccacg

SEQ ID NO: 373 - DNA, 15 bp, synthetic construct
  source 1..15: mol_type = other DNA
aatagatcctggagg

SEQ ID NO: 374 - DNA, 15 bp, synthetic construct
  source 1..15: mol_type = other DNA
ggtaactctagcctt

SEQ ID NO: 375 - DNA, 15 bp, synthetic construct
  source 1..15: mol_type = other DNA
gtatttgtgcagcga

SEQ ID NO: 376 - DNA, 15 bp, synthetic construct
  source 1..15: mol_type = other DNA
gagacgacccgatgg

SEQ ID NO: 377 - DNA, 15 bp, synthetic construct
  source 1..15: mol_type = other DNA
tgaagttcccaactc

SEQ ID NO: 378 - DNA, 15 bp, synthetic construct
  source 1..15: mol_type = other DNA
tgcttcttttaggat

SEQ ID NO: 379 - DNA, 15 bp, synthetic construct
  source 1..15: mol_type = other DNA
gtaccattcatgctc

SEQ ID NO: 380 - DNA, 15 bp, synthetic construct
  source 1..15: mol_type = other DNA
ctacagccaaaatgg

SEQ ID NO: 381 - DNA, 15 bp, synthetic construct
  source 1..15: mol_type = other DNA
tccaaaaggtttagg

SEQ ID NO: 382 - DNA, 15 bp, synthetic construct
  source 1..15: mol_type = other DNA
caacatggaaagcga

SEQ ID NO: 383 - DNA, 15 bp, synthetic construct
  source 1..15: mol_type = other DNA
ctcacaggtgggcca

SEQ ID NO: 384 - DNA, 15 bp, synthetic construct
  source 1..15: mol_type = other DNA
agtacagttggaatt

SEQ ID NO: 385 - DNA, 15 bp, synthetic construct
  source 1..15: mol_type = other DNA
ccaatacaggtcctt

SEQ ID NO: 386 - DNA, 15 bp, synthetic construct
  source 1..15: mol_type = other DNA
aatgcacatgacttg

SEQ ID NO: 387 - DNA, 15 bp, synthetic construct
  source 1..15: mol_type = other DNA
gccagagctacatct

SEQ ID NO: 388 - DNA, 15 bp, synthetic construct
  source 1..15: mol_type = other DNA
agatataactgtcac

SEQ ID NO: 389 - DNA, 15 bp, synthetic construct
  source 1..15: mol_type = other DNA
tgttgaaggtggccg

SEQ ID NO: 390 - DNA, 15 bp, synthetic construct
  source 1..15: mol_type = other DNA
tgctcccacgccaca

SEQ ID NO: 391 - DNA, 15 bp, synthetic construct
  source 1..15: mol_type = other DNA
acacctgcgtgggtg

SEQ ID NO: 392 - DNA, 15 bp, synthetic construct
  source 1..15: mol_type = other DNA
tagaacccaaggaag

SEQ ID NO: 393 - DNA, 15 bp, synthetic construct
  source 1..15: mol_type = other DNA
gggtacgctaatcca

SEQ ID NO: 394 - DNA, 15 bp, synthetic construct
  source 1..15: mol_type = other DNA
cgcgggtcataaacc

SEQ ID NO: 395 - DNA, 15 bp, synthetic construct
  source 1..15: mol_type = other DNA
tgacaactcgaggag

SEQ ID NO: 396 - DNA, 15 bp, synthetic construct
  source 1..15: mol_type = other DNA
tgtcaaaggtggagc

SEQ ID NO: 397 - DNA, 15 bp, synthetic construct
  source 1..15: mol_type = other DNA
tctttgtaaccctga

SEQ ID NO: 398 - DNA, 15 bp, synthetic construct
  source 1..15: mol_type = other DNA
gcagcggcatgcata

SEQ ID NO: 399 - DNA, 15 bp, synthetic construct
  source 1..15: mol_type = other DNA
tgaagggctcgacag

SEQ ID NO: 400 - DNA, 15 bp, synthetic construct
  source 1..15: mol_type = other DNA
agaattcaggcagga

SEQ ID NO: 401 - DNA, 15 bp, synthetic construct
  source 1..15: mol_type = other DNA
ttctgcccttcggtc

SEQ ID NO: 402 - DNA, 15 bp, synthetic construct
  source 1..15: mol_type = other DNA
atgcgggcagcgaga

SEQ ID NO: 403 - DNA, 15 bp, synthetic construct
  source 1..15: mol_type = other DNA
cggagtagaaaggac

SEQ ID NO: 404 - DNA, 15 bp, synthetic construct
  source 1..15: mol_type = other DNA
ccagattctcctcct

SEQ ID NO: 405 - DNA, 15 bp, synthetic construct
  source 1..15: mol_type = other DNA
gttgtcgcggatgcg

SEQ ID NO: 406 - DNA, 15 bp, synthetic construct
  source 1..15: mol_type = other DNA
gtcctgagactttag

SEQ ID NO: 407 - DNA, 15 bp, synthetic construct
  source 1..15: mol_type = other DNA
tttacaaaggcacac

SEQ ID NO: 408 - DNA, 15 bp, synthetic construct
  source 1..15: mol_type = other DNA
aggatgagttcaggt

SEQ ID NO: 409 - DNA, 15 bp, synthetic construct
  source 1..15: mol_type = other DNA
actgaccggtctgat

SEQ ID NO: 410 - DNA, 15 bp, synthetic construct
  source 1..15: mol_type = other DNA
gattccacttaacct

SEQ ID NO: 411 - DNA, 15 bp, synthetic construct
  source 1..15: mol_type = other DNA
tgagcggttgcagta

SEQ ID NO: 412 - DNA, 15 bp, synthetic construct
  source 1..15: mol_type = other DNA
cagcgtacaaggccc

SEQ ID NO: 413 - DNA, 15 bp, synthetic construct
  source 1..15: mol_type = other DNA
taacgtgccagaaat

SEQ ID NO: 414 - DNA, 15 bp, synthetic construct
  source 1..15: mol_type = other DNA
agtgtatgaaaccgt

SEQ ID NO: 415 - DNA, 15 bp, synthetic construct
  source 1..15: mol_type = other DNA
gatctgttcagccac

SEQ ID NO: 416 - DNA, 15 bp, synthetic construct
  source 1..15: mol_type = other DNA
tattcgcccgtccct

SEQ ID NO: 417 - DNA, 15 bp, synthetic construct
  source 1..15: mol_type = other DNA
atgagctgatttgtc

SEQ ID NO: 418 - DNA, 15 bp, synthetic construct
  source 1..15: mol_type = other DNA
gatctgtgtcccttc

SEQ ID NO: 419 - DNA, 15 bp, synthetic construct
  source 1..15: mol_type = other DNA
cgtccacggatagca

SEQ ID NO: 420 - DNA, 15 bp, synthetic construct
  source 1..15: mol_type = other DNA
agtggaatagcatgc

SEQ ID NO: 421 - DNA, 15 bp, synthetic construct
  source 1..15: mol_type = other DNA
aaatgctctggcctt

SEQ ID NO: 422 - DNA, 15 bp, synthetic construct
  source 1..15: mol_type = other DNA
ctgctctaatagagc

SEQ ID NO: 423 - DNA, 15 bp, synthetic construct
  source 1..15: mol_type = other DNA
accaatggcctagct

SEQ ID NO: 424 - DNA, 15 bp, synthetic construct
  source 1..15: mol_type = other DNA
ggtaggagcctgcag

SEQ ID NO: 425 - DNA, 15 bp, synthetic construct
  source 1..15: mol_type = other DNA
gggtaaggtataccc

SEQ ID NO: 426 - DNA, 15 bp, synthetic construct
  source 1..15: mol_type = other DNA
tgcggacaagagacg

SEQ ID NO: 427 - DNA, 15 bp, synthetic construct
  source 1..15: mol_type = other DNA
acgtacctctgctcc

SEQ ID NO: 428 - DNA, 15 bp, synthetic construct
  source 1..15: mol_type = other DNA
tagaactaccagggc

SEQ ID NO: 429 - DNA, 15 bp, synthetic construct
  source 1..15: mol_type = other DNA
ggagcttgtagatgc

SEQ ID NO: 430 - DNA, 15 bp, synthetic construct
  source 1..15: mol_type = other DNA
ccagcacacactgac

SEQ ID NO: 431 - DNA, 15 bp, synthetic construct
  source 1..15: mol_type = other DNA
tgtgtactgggacca

SEQ ID NO: 432 - DNA, 15 bp, synthetic construct
  source 1..15: mol_type = other DNA
tgaagtcggatttca

SEQ ID NO: 433 - DNA, 15 bp, synthetic construct
  source 1..15: mol_type = other DNA
ctccagacaacctcc

SEQ ID NO: 434 - DNA, 15 bp, synthetic construct
  source 1..15: mol_type = other DNA
agaccttccgtgatg

SEQ ID NO: 435 - DNA, 15 bp, synthetic construct
  source 1..15: mol_type = other DNA
acagcggtatgaccc

SEQ ID NO: 436 - DNA, 15 bp, synthetic construct
  source 1..15: mol_type = other DNA
ctgctgtgtcagaga

SEQ ID NO: 437 - DNA, 15 bp, synthetic construct
  source 1..15: mol_type = other DNA
ctcttaagtggctgc

SEQ ID NO: 438 - DNA, 15 bp, synthetic construct
  source 1..15: mol_type = other DNA
tgagcccagacaatg

SEQ ID NO: 439 - DNA, 15 bp, synthetic construct
  source 1..15: mol_type = other DNA
tgctaagatggagtg

SEQ ID NO: 440 - DNA, 15 bp, synthetic construct
  source 1..15: mol_type = other DNA
aatgacagaatggtt

SEQ ID NO: 441 - DNA, 15 bp, synthetic construct
  source 1..15: mol_type = other DNA
aggcaatgtcttcat

SEQ ID NO: 442 - DNA, 15 bp, synthetic construct
  source 1..15: mol_type = other DNA
ctttgtgcagcagct

SEQ ID NO: 443 - DNA, 15 bp, synthetic construct
  source 1..15: mol_type = other DNA
cctgttagcacagta

SEQ ID NO: 444 - DNA, 15 bp, synthetic construct
  source 1..15: mol_type = other DNA
taagacccaagcact

SEQ ID NO: 445 - DNA, 15 bp, synthetic construct
  source 1..15: mol_type = other DNA
cagtggcatctgtga

SEQ ID NO: 446 - DNA, 15 bp, synthetic construct
  source 1..15: mol_type = other DNA
ccctgttggagtcag

SEQ ID NO: 447 - DNA, 15 bp, synthetic construct
  source 1..15: mol_type = other DNA
cgtccttggagggtc

SEQ ID NO: 448 - DNA, 15 bp, synthetic construct
  source 1..15: mol_type = other DNA
agcagtacttgggaa

SEQ ID NO: 449 - DNA, 15 bp, synthetic construct
  source 1..15: mol_type = other DNA
tttacatttcttgcc

SEQ ID NO: 450 - DNA, 15 bp, synthetic construct
  source 1..15: mol_type = other DNA
tttctcgtgcaccat

SEQ ID NO: 451 - DNA, 15 bp, synthetic construct
  source 1..15: mol_type = other DNA
aggctttgcttcgtc

SEQ ID NO: 452 - DNA, 15 bp, synthetic construct
  source 1..15: mol_type = other DNA
cctatctcgaattgg

SEQ ID NO: 453 - DNA, 15 bp, synthetic construct
  source 1..15: mol_type = other DNA
ctattctgactaact

SEQ ID NO: 454 - DNA, 15 bp, synthetic construct
  source 1..15: mol_type = other DNA
atctaccctatatcc

SEQ ID NO: 455 - DNA, 15 bp, synthetic construct
  source 1..15: mol_type = other DNA
ttaagaagaagaccc

SEQ ID NO: 456 - DNA, 15 bp, synthetic construct
  source 1..15: mol_type = other DNA
tgtggtgaatgaaag

SEQ ID NO: 457 - DNA, 15 bp, synthetic construct
  source 1..15: mol_type = other DNA
ccagtgagtctctac

SEQ ID NO: 458 - DNA, 15 bp, synthetic construct
  source 1..15: mol_type = other DNA
tttgccctgattcct

SEQ ID NO: 459 - DNA, 15 bp, synthetic construct
  source 1..15: mol_type = other DNA
gacattgggcgtcct

SEQ ID NO: 460 - DNA, 15 bp, synthetic construct
  source 1..15: mol_type = other DNA
cccaaatagaccctg

SEQ ID NO: 461 - DNA, 15 bp, synthetic construct
  source 1..15: mol_type = other DNA
agaaccacaaactca

SEQ ID NO: 462 - DNA, 15 bp, synthetic construct
  source 1..15: mol_type = other DNA
ctgctttggactagg

SEQ ID NO: 463 - DNA, 15 bp, synthetic construct
  source 1..15: mol_type = other DNA
ggtaatcgatttcat

SEQ ID NO: 464 - DNA, 15 bp, synthetic construct
  source 1..15: mol_type = other DNA
gtgaccctttttggg

SEQ ID NO: 465 - DNA, 15 bp, synthetic construct
  source 1..15: mol_type = other DNA
caaacgcccaaagcg

SEQ ID NO: 466 - DNA, 15 bp, synthetic construct
  source 1..15: mol_type = other DNA
ttggtcaggacctct

SEQ ID NO: 467 - DNA, 15 bp, synthetic construct
  source 1..15: mol_type = other DNA
ttaattaacactggc

SEQ ID NO: 468 - DNA, 15 bp, synthetic construct
  source 1..15: mol_type = other DNA
agagcatgtgtcacg

SEQ ID NO: 469 - DNA, 15 bp, synthetic construct
  source 1..15: mol_type = other DNA
tgtgagtctctgaag

SEQ ID NO: 470 - DNA, 15 bp, synthetic construct
  source 1..15: mol_type = other DNA
tggagagaagtgtga

SEQ ID NO: 471 - DNA, 15 bp, synthetic construct
  source 1..15: mol_type = other DNA
tattcttaggcctcc

SEQ ID NO: 472 - DNA, 15 bp, synthetic construct
  source 1..15: mol_type = other DNA
ccattttacaggcgg

SEQ ID NO: 473 - DNA, 15 bp, synthetic construct
  source 1..15: mol_type = other DNA
tggaagtgagagtcc

SEQ ID NO: 474 - DNA, 15 bp, synthetic construct
  source 1..15: mol_type = other DNA
atgcacagtcctccc

SEQ ID NO: 475 - DNA, 15 bp, synthetic construct
  source 1..15: mol_type = other DNA
tacaaaacacagtag

SEQ ID NO: 476 - DNA, 15 bp, synthetic construct
  source 1..15: mol_type = other DNA
gcagatttcccactg

SEQ ID NO: 477 - DNA, 15 bp, synthetic construct
  source 1..15: mol_type = other DNA
caggttcaggtacca

SEQ ID NO: 478 - DNA, 15 bp, synthetic construct
  source 1..15: mol_type = other DNA
aatgaagcacctggg

SEQ ID NO: 479 - DNA, 15 bp, synthetic construct
  source 1..15: mol_type = other DNA
attccaggaagaggt

SEQ ID NO: 480 - DNA, 15 bp, synthetic construct
  source 1..15: mol_type = other DNA
actgaagctcatgtt

SEQ ID NO: 481 - DNA, 15 bp, synthetic construct
  source 1..15: mol_type = other DNA
atgcaaattactgca

SEQ ID NO: 482 - DNA, 15 bp, synthetic construct
  source 1..15: mol_type = other DNA
acagttatttccctc

SEQ ID NO: 483 - DNA, 15 bp, synthetic construct
  source 1..15: mol_type = other DNA
tttcaacctgacagg

SEQ ID NO: 484 - DNA, 15 bp, synthetic construct
  source 1..15: mol_type = other DNA
caggttccctcgaga

SEQ ID NO: 485 - DNA, 15 bp, synthetic construct
  source 1..15: mol_type = other DNA
gaggttaccaccgtg

SEQ ID NO: 486 - DNA, 15 bp, synthetic construct
  source 1..15: mol_type = other DNA
ttagactccttctca

SEQ ID NO: 487 - DNA, 15 bp, synthetic construct
  source 1..15: mol_type = other DNA
gttgtcagtcaaggg

SEQ ID NO: 488 - DNA, 15 bp, synthetic construct
  source 1..15: mol_type = other DNA
ccctactgtgtgcat

SEQ ID NO: 489 - DNA, 15 bp, synthetic construct
  source 1..15: mol_type = other DNA
cgaagcggatggtct

SEQ ID NO: 490 - DNA, 15 bp, synthetic construct
  source 1..15: mol_type = other DNA
tagtggtgtcacctt

SEQ ID NO: 491 - DNA, 15 bp, synthetic construct
  source 1..15: mol_type = other DNA
catagtcacagaagg

SEQ ID NO: 492 - DNA, 15 bp, synthetic construct
  source 1..15: mol_type = other DNA
attccaatcccgcct

SEQ ID NO: 493 - DNA, 15 bp, synthetic construct
  source 1..15: mol_type = other DNA
gcagagaaggcgatt

SEQ ID NO: 494 - DNA, 15 bp, synthetic construct
  source 1..15: mol_type = other DNA
gggataatgagtgct

SEQ ID NO: 495 - DNA, 15 bp, synthetic construct
  source 1..15: mol_type = other DNA
gatgctgttggcacc

SEQ ID NO: 496 - DNA, 15 bp, synthetic construct
  source 1..15: mol_type = other DNA
tgtcagacgcctcct

SEQ ID NO: 497 - DNA, 15 bp, synthetic construct
  source 1..15: mol_type = other DNA
cccgattcacctttg

SEQ ID NO: 498 - DNA, 15 bp, synthetic construct
  source 1..15: mol_type = other DNA
caaaagaaggaggcc

SEQ ID NO: 499 - DNA, 15 bp, synthetic construct
  source 1..15: mol_type = other DNA
tactgtgtcagacgc

SEQ ID NO: 500 - DNA, 15 bp, synthetic construct
  source 1..15: mol_type = other DNA
tcccatggtaccttt

SEQ ID NO: 501 - DNA, 15 bp, synthetic construct
  source 1..15: mol_type = other DNA
gggctcataattgtt

SEQ ID NO: 502 - DNA, 15 bp, synthetic construct
  source 1..15: mol_type = other DNA
caaccatggccttca

SEQ ID NO: 503 - DNA, 15 bp, synthetic construct
  source 1..15: mol_type = other DNA
ccatctgctaccggc

SEQ ID NO: 504 - DNA, 15 bp, synthetic construct
  source 1..15: mol_type = other DNA
gaagcggaagttccc

SEQ ID NO: 505 - DNA, 15 bp, synthetic construct
  source 1..15: mol_type = other DNA
gaagtagtagagacc

SEQ ID NO: 506 - DNA, 15 bp, synthetic construct
  source 1..15: mol_type = other DNA
aaacagcctaactgg

SEQ ID NO: 507 - DNA, 15 bp, synthetic construct
  source 1..15: mol_type = other DNA
ccatccttccctggt

SEQ ID NO: 508 - DNA, 15 bp, synthetic construct
  source 1..15: mol_type = other DNA
catctgcccatacct

SEQ ID NO: 509 - DNA, 15 bp, synthetic construct
  source 1..15: mol_type = other DNA
tcccgggaatggctg

SEQ ID NO: 510 - DNA, 15 bp, synthetic construct
  source 1..15: mol_type = other DNA
agaagttcagaggaa

SEQ ID NO: 511 - DNA, 15 bp, synthetic construct
  source 1..15: mol_type = other DNA
aaggatgcagactgg

SEQ ID NO: 512 - DNA, 15 bp, synthetic construct
  source 1..15: mol_type = other DNA
tcgtgtcataatctc

SEQ ID NO: 513 - DNA, 15 bp, synthetic construct
  source 1..15: mol_type = other DNA
ccagaaggcattggt

SEQ ID NO: 514 - DNA, 15 bp, synthetic construct
  source 1..15: mol_type = other DNA
tagacaaagtagtag

SEQ ID NO: 515 - DNA, 15 bp, synthetic construct
  source 1..15: mol_type = other DNA
catttggtctctaga

SEQ ID NO: 516 - DNA, 15 bp, synthetic construct
  source 1..15: mol_type = other DNA
gactggaatttctgc

SEQ ID NO: 517 - DNA, 15 bp, synthetic construct
  source 1..15: mol_type = other DNA
tgaatctgatcaggc

SEQ ID NO: 518 - DNA, 15 bp, synthetic construct
  source 1..15: mol_type = other DNA
atgggctatctccct

SEQ ID NO: 519 - DNA, 15 bp, synthetic construct
  source 1..15: mol_type = other DNA
tggacgtgtggccac

SEQ ID NO: 520 - DNA, 15 bp, synthetic construct
  source 1..15: mol_type = other DNA
agtcattgacagcca

SEQ ID NO: 521 - DNA, 15 bp, synthetic construct
  source 1..15: mol_type = other DNA
tgtgtctgtgtccgc

SEQ ID NO: 522 - DNA, 15 bp, synthetic construct
  source 1..15: mol_type = other DNA
ttgcccatactgatc

SEQ ID NO: 523 - DNA, 15 bp, synthetic construct
  source 1..15: mol_type = other DNA
ttaactcctaggcag

SEQ ID NO: 524 - DNA, 15 bp, synthetic construct
  source 1..15: mol_type = other DNA
acacgctaaaggcaa

SEQ ID NO: 525 - DNA, 15 bp, synthetic construct
  source 1..15: mol_type = other DNA
agatctcgaaaaact

SEQ ID NO: 526 - DNA, 15 bp, synthetic construct
  source 1..15: mol_type = other DNA
tacagcttccctcca

SEQ ID NO: 527 - DNA, 15 bp, synthetic construct
  source 1..15: mol_type = other DNA
aatgaacagttctac

SEQ ID NO: 528 - DNA, 15 bp, synthetic construct
  source 1..15: mol_type = other DNA
acattatagctcaca

SEQ ID NO: 529 - DNA, 15 bp, synthetic construct
  source 1..15: mol_type = other DNA
gtaaagcatccagtt

SEQ ID NO: 530 - DNA, 15 bp, synthetic construct
  source 1..15: mol_type = other DNA
tatggatccaagcag

SEQ ID NO: 531 - DNA, 15 bp, synthetic construct
  source 1..15: mol_type = other DNA
gacaccaggatatgc

SEQ ID NO: 532 - DNA, 15 bp, synthetic construct
  source 1..15: mol_type = other DNA
caacatcatttgttg

SEQ ID NO: 533 - DNA, 15 bp, synthetic construct
  source 1..15: mol_type = other DNA
tgcactggtagtaac

SEQ ID NO: 534 - DNA, 15 bp, synthetic construct
  source 1..15: mol_type = other DNA
gatgttttctcatct

SEQ ID NO: 535 - DNA, 15 bp, synthetic construct
  source 1..15: mol_type = other DNA
agaatgagccacaca

SEQ ID NO: 536 - DNA, 15 bp, synthetic construct
  source 1..15: mol_type = other DNA
atctctcatagctcc

SEQ ID NO: 537 - DNA, 15 bp, synthetic construct
  source 1..15: mol_type = other DNA
ctgtggtcagtatca

SEQ ID NO: 538 - DNA, 15 bp, synthetic construct
  source 1..15: mol_type = other DNA
ccaactctagttatc

SEQ ID NO: 539 - DNA, 15 bp, synthetic construct
  source 1..15: mol_type = other DNA
catagactttcttct

SEQ ID NO: 540 - DNA, 15 bp, synthetic construct
  source 1..15: mol_type = other DNA
tcagcgtgtgcgcga

SEQ ID NO: 541 - DNA, 15 bp, synthetic construct
  source 1..15: mol_type = other DNA
tcccttatagtgcac

SEQ ID NO: 542 - DNA, 15 bp, synthetic construct
  source 1..15: mol_type = other DNA
tgtcatctggtgctc

SEQ ID NO: 543 - DNA, 15 bp, synthetic construct
  source 1..15: mol_type = other DNA
ctgcaaaggactcct

SEQ ID NO: 544 - DNA, 15 bp, synthetic construct
  source 1..15: mol_type = other DNA
atctgtcgctgctcc

SEQ ID NO: 545 - DNA, 15 bp, synthetic construct
  source 1..15: mol_type = other DNA
ggtgggaacgttctt

SEQ ID NO: 546 - DNA, 15 bp, synthetic construct
  source 1..15: mol_type = other DNA
tgcatggctttctcc

SEQ ID NO: 547 - DNA, 15 bp, synthetic construct
  source 1..15: mol_type = other DNA
atagcgtaccttctg

SEQ ID NO: 548 - DNA, 15 bp, synthetic construct
  source 1..15: mol_type = other DNA
ctcgtgtgtcttact

SEQ ID NO: 549 - DNA, 15 bp, synthetic construct
  source 1..15: mol_type = other DNA
ggagaaaccttgaag

SEQ ID NO: 550 - DNA, 15 bp, synthetic construct
  source 1..15: mol_type = other DNA
cttttcctcggcact

SEQ ID NO: 551 - DNA, 15 bp, synthetic construct
  source 1..15: mol_type = other DNA
ctggctacgctgatc

SEQ ID NO: 552 - DNA, 15 bp, synthetic construct
  source 1..15: mol_type = other DNA
cctgtgagttgtccc

SEQ ID NO: 553 - DNA, 15 bp, synthetic construct
  source 1..15: mol_type = other DNA
gttgctgtccatccc

SEQ ID NO: 554 - DNA, 15 bp, synthetic construct
  source 1..15: mol_type = other DNA
cgtgacaggtcgctt

SEQ ID NO: 555 - DNA, 15 bp, synthetic construct
  source 1..15: mol_type = other DNA
gattactgcctggac

SEQ ID NO: 556 - DNA, 15 bp, synthetic construct
  source 1..15: mol_type = other DNA
ctctttgaccgcgcg

SEQ ID NO: 557 - DNA, 15 bp, synthetic construct
  source 1..15: mol_type = other DNA
tttcacaaacacgct

SEQ ID NO: 558 - DNA, 15 bp, synthetic construct
  source 1..15: mol_type = other DNA
gcaaatcatcatctg

SEQ ID NO: 559 - DNA, 15 bp, synthetic construct
  source 1..15: mol_type = other DNA
tttttctcgatgttc

SEQ ID NO: 560 - DNA, 15 bp, synthetic construct
  source 1..15: mol_type = other DNA
ctgtgcagcgtcctc

SEQ ID NO: 561 - DNA, 15 bp, synthetic construct
  source 1..15: mol_type = other DNA
gagatgtgcaagagt

SEQ ID NO: 562 - DNA, 15 bp, synthetic construct
  source 1..15: mol_type = other DNA
gatttgcttcctggg

SEQ ID NO: 563 - DNA, 15 bp, synthetic construct
  source 1..15: mol_type = other DNA
catgttcaccagctt

SEQ ID NO: 564 - DNA, 15 bp, synthetic construct
  source 1..15: mol_type = other DNA
atggttgcgtcggag

SEQ ID NO: 565 - DNA, 15 bp, synthetic construct
  source 1..15: mol_type = other DNA
tgaggctatccactt

SEQ ID NO: 566 - DNA, 15 bp, synthetic construct
  source 1..15: mol_type = other DNA
atccggaagctcctc

SEQ ID NO: 567 - DNA, 15 bp, synthetic construct
  source 1..15: mol_type = other DNA
tctctgcgataccct

SEQ ID NO: 568 - DNA, 15 bp, synthetic construct
  source 1..15: mol_type = other DNA
tgcaaggagaaagat

SEQ ID NO: 569 - DNA, 15 bp, synthetic construct
  source 1..15: mol_type = other DNA
gagttcgagtccgct

SEQ ID NO: 570 - DNA, 15 bp, synthetic construct
  source 1..15: mol_type = other DNA
ccctgcaaaggcact

SEQ ID NO: 571 - DNA, 15 bp, synthetic construct
  source 1..15: mol_type = other DNA
ggacaatcttacaga

SEQ ID NO: 572 - DNA, 15 bp, synthetic construct
  source 1..15: mol_type = other DNA
tggacattcgtccag

SEQ ID NO: 573 - DNA, 15 bp, synthetic construct
  source 1..15: mol_type = other DNA
gttactctcccggct

SEQ ID NO: 574 - DNA, 15 bp, synthetic construct
  source 1..15: mol_type = other DNA
ggagtcacagatgaa

SEQ ID NO: 575 - DNA, 15 bp, synthetic construct
  source 1..15: mol_type = other DNA
agcccatgtagtccc

SEQ ID NO: 576 - DNA, 15 bp, synthetic construct
  source 1..15: mol_type = other DNA
gtttgcagagtgcct

SEQ ID NO: 577 - DNA, 15 bp, synthetic construct
  source 1..15: mol_type = other DNA
caaaccgaggcgcga

SEQ ID NO: 578 - DNA, 15 bp, synthetic construct
  source 1..15: mol_type = other DNA
ggacctcaactcctc

SEQ ID NO: 579 - DNA, 15 bp, synthetic construct
  source 1..15: mol_type = other DNA
acgctgacgcagact

SEQ ID NO: 580 - DNA, 15 bp, synthetic construct
  source 1..15: mol_type = other DNA
ccgctctggaattcc

SEQ ID NO: 581 - DNA, 15 bp, synthetic construct
  source 1..15: mol_type = other DNA
aaaagccctcgcagt

SEQ ID NO: 582 - DNA, 15 bp, synthetic construct
  source 1..15: mol_type = other DNA
ggaatgtttttgctt

SEQ ID NO: 583 - DNA, 15 bp, synthetic construct
  source 1..15: mol_type = other DNA
gaggcgagagtgcga

SEQ ID NO: 584 - DNA, 15 bp, synthetic construct
  source 1..15: mol_type = other DNA
tcaagaggaaaagca

SEQ ID NO: 585 - DNA, 15 bp, synthetic construct
  source 1..15: mol_type = other DNA
cccattgggaacctt

SEQ ID NO: 586 - DNA, 15 bp, synthetic construct
  source 1..15: mol_type = other DNA
ttctgggttagtctc

SEQ ID NO: 587 - DNA, 15 bp, synthetic construct
  source 1..15: mol_type = other DNA
ccacttctgcttggg

SEQ ID NO: 588 - DNA, 15 bp, synthetic construct
  source 1..15: mol_type = other DNA
ttgggacacttgctg

SEQ ID NO: 589 - DNA, 15 bp, synthetic construct
  source 1..15: mol_type = other DNA
ggtttgcttgtccag

SEQ ID NO: 590 - DNA, 15 bp, synthetic construct
  source 1..15: mol_type = other DNA
gctaaagaaattggg

SEQ ID NO: 591 - DNA, 15 bp, synthetic construct
  source 1..15: mol_type = other DNA
cagggaaggttggtg

SEQ ID NO: 592 - DNA, 15 bp, synthetic construct
  source 1..15: mol_type = other DNA
gggttgtggagtgag

SEQ ID NO: 593 - DNA, 15 bp, synthetic construct
  source 1..15: mol_type = other DNA
taggtttatgaggct

SEQ ID NO: 594 - DNA, 15 bp, synthetic construct
  source 1..15: mol_type = other DNA
cctattggtgaagtt

SEQ ID NO: 595 - DNA, 15 bp, synthetic construct
  source 1..15: mol_type = other DNA
atagctcgcgagcct

SEQ ID NO: 596 - DNA, 15 bp, synthetic construct
  source 1..15: mol_type = other DNA
ggttcactttttccc

SEQ ID NO: 597 - DNA, 15 bp, synthetic construct
  source 1..15: mol_type = other DNA
ccctcaaaacatccc

SEQ ID NO: 598 - DNA, 15 bp, synthetic construct
  source 1..15: mol_type = other DNA
tctagaagtgcagcc

SEQ ID NO: 599 - DNA, 15 bp, synthetic construct
  source 1..15: mol_type = other DNA
gccacaatggtcttg

SEQ ID NO: 600 - DNA, 15 bp, synthetic construct
  source 1..15: mol_type = other DNA
cagtgttgagtaccc

SEQ ID NO: 601 - DNA, 15 bp, synthetic construct
  source 1..15: mol_type = other DNA
gtgaaacctccaacc

SEQ ID NO: 602 - DNA, 15 bp, synthetic construct
  source 1..15: mol_type = other DNA
cccagtcacgttccc

SEQ ID NO: 603 - DNA, 15 bp, synthetic construct
  source 1..15: mol_type = other DNA
cctttcacgtggtcc

SEQ ID NO: 604 - DNA, 15 bp, synthetic construct
  source 1..15: mol_type = other DNA
ttcttgggctatgtc

SEQ ID NO: 605 - DNA, 15 bp, synthetic construct
  source 1..15: mol_type = other DNA
tggatttgcgcacac

SEQ ID NO: 606 - DNA, 15 bp, synthetic construct
  source 1..15: mol_type = other DNA
gaggcacaaattaga

SEQ ID NO: 607 - DNA, 15 bp, synthetic construct
  source 1..15: mol_type = other DNA
aaagcattgcaaaac

SEQ ID NO: 608 - DNA, 15 bp, synthetic construct
  source 1..15: mol_type = other DNA
cagccttcattggcc

SEQ ID NO: 609 - DNA, 15 bp, synthetic construct
  source 1..15: mol_type = other DNA
aggagcaaactcttg

SEQ ID NO: 610 - DNA, 15 bp, synthetic construct
  source 1..15: mol_type = other DNA
cgcgagtctgctgac

SEQ ID NO: 611 - DNA, 15 bp, synthetic construct
  source 1..15: mol_type = other DNA
ggtctgtgtatccaa

SEQ ID NO: 612 - DNA, 15 bp, synthetic construct
  source 1..15: mol_type = other DNA
gttatattctgacag

SEQ ID NO: 613 - DNA, 15 bp, synthetic construct
  source 1..15: mol_type = other DNA
ggtgacggaatgtgg

SEQ ID NO: 614 - DNA, 15 bp, synthetic construct
  source 1..15: mol_type = other DNA
gcatccgatacacat

SEQ ID NO: 615 - DNA, 15 bp, synthetic construct
  source 1..15: mol_type = other DNA
tggaatctgccggga

SEQ ID NO: 616 - DNA, 15 bp, synthetic construct
  source 1..15: mol_type = other DNA
gcctacacaggctga

SEQ ID NO: 617 - DNA, 15 bp, synthetic construct
  source 1..15: mol_type = other DNA
atagaagaggtagct

SEQ ID NO: 618 - DNA, 15 bp, synthetic construct
  source 1..15: mol_type = other DNA
accagacgcggtgtg

SEQ ID NO: 619 - DNA, 15 bp, synthetic construct
  source 1..15: mol_type = other DNA
acaatcacaaacaca

SEQ ID NO: 620 - DNA, 15 bp, synthetic construct
  source 1..15: mol_type = other DNA
aagaggttttctcag

SEQ ID NO: 621 - DNA, 15 bp, synthetic construct
  source 1..15: mol_type = other DNA
gttgcgaggaagctt

SEQ ID NO: 622 - DNA, 15 bp, synthetic construct
  source 1..15: mol_type = other DNA
ttgcttgcttctttt

SEQ ID NO: 623 - DNA, 15 bp, synthetic construct
  source 1..15: mol_type = other DNA
ccaggtcatacacgt

SEQ ID NO: 624 - DNA, 15 bp, synthetic construct
  source 1..15: mol_type = other DNA
gtgtctcatggagaa

SEQ ID NO: 625 - DNA, 15 bp, synthetic construct
  source 1..15: mol_type = other DNA
cagtgacagtggacc

SEQ ID NO: 626 - DNA, 15 bp, synthetic construct
  source 1..15: mol_type = other DNA
gagtcatacaggaaa

SEQ ID NO: 627 - DNA, 15 bp, synthetic construct
  source 1..15: mol_type = other DNA
gcagcgcctcagaag

SEQ ID NO: 628 - DNA, 15 bp, synthetic construct
  source 1..15: mol_type = other DNA
tactccttgatgtgg

SEQ ID NO: 629 - DNA, 15 bp, synthetic construct
  source 1..15: mol_type = other DNA
ctttcgggtgacaaa

SEQ ID NO: 630 - DNA, 15 bp, synthetic construct
  source 1..15: mol_type = other DNA
ggatgacagcgaggg

SEQ ID NO: 631 - DNA, 15 bp, synthetic construct
  source 1..15: mol_type = other DNA
gactctccatcctag

SEQ ID NO: 632 - DNA, 15 bp, synthetic construct
  source 1..15: mol_type = other DNA
actcccgaacccatt

SEQ ID NO: 633 - DNA, 15 bp, synthetic construct
  source 1..15: mol_type = other DNA
agtaagctcctgtga

SEQ ID NO: 634 - DNA, 15 bp, synthetic construct
  source 1..15: mol_type = other DNA
ttaagagtgcagtgt

SEQ ID NO: 635 - DNA, 15 bp, synthetic construct
  source 1..15: mol_type = other DNA
ctgctgtgtggtaga

SEQ ID NO: 636 - DNA, 15 bp, synthetic construct
  source 1..15: mol_type = other DNA
acaggcaaatttgtg

SEQ ID NO: 637 - DNA, 15 bp, synthetic construct
  source 1..15: mol_type = other DNA
ggcatgctgacttcc

SEQ ID NO: 638 - DNA, 15 bp, synthetic construct
  source 1..15: mol_type = other DNA
atttccaaagcagag

SEQ ID NO: 639 - DNA, 15 bp, synthetic construct
  source 1..15: mol_type = other DNA
ctcagcaactgaacc

SEQ ID NO: 640 - DNA, 15 bp, synthetic construct
  source 1..15: mol_type = other DNA
aagagctatgtgaaa

SEQ ID NO: 641 - DNA, 15 bp, synthetic construct
  source 1..15: mol_type = other DNA
cgtatactgtgattc

SEQ ID NO: 642 - DNA, 15 bp, synthetic construct
  source 1..15: mol_type = other DNA
gagatgtggacagca

SEQ ID NO: 643 - DNA, 15 bp, synthetic construct
  source 1..15: mol_type = other DNA
gccaatcaacaacta

SEQ ID NO: 644 - DNA, 15 bp, synthetic construct
  source 1..15: mol_type = other DNA
tgcagtggttccaca

SEQ ID NO: 645 - DNA, 15 bp, synthetic construct
  source 1..15: mol_type = other DNA
ctcctggagagatca

SEQ ID NO: 646 - DNA, 15 bp, synthetic construct
  source 1..15: mol_type = other DNA
caaggttaaatacac

SEQ ID NO: 647 - DNA, 15 bp, synthetic construct
  source 1..15: mol_type = other DNA
actcaggccgaagaa

SEQ ID NO: 648 - DNA, 15 bp, synthetic construct
  source 1..15: mol_type = other DNA
cctgctcaaaattct

SEQ ID NO: 649 - DNA, 15 bp, synthetic construct
  source 1..15: mol_type = other DNA
aaataaccgatgtga

SEQ ID NO: 650 - DNA, 15 bp, synthetic construct
  source 1..15: mol_type = other DNA
atatcactgagccag

SEQ ID NO: 651 - DNA, 15 bp, synthetic construct
  source 1..15: mol_type = other DNA
caccgaagcagggtt

SEQ ID NO: 652 - DNA, 15 bp, synthetic construct
  source 1..15: mol_type = other DNA
ggagctgagatgagc

SEQ ID NO: 653 - DNA, 15 bp, synthetic construct
  source 1..15: mol_type = other DNA
gggaaatgcgtcctt

SEQ ID NO: 654 - DNA, 15 bp, synthetic construct
  source 1..15: mol_type = other DNA
tgggtgacatagtct

SEQ ID NO: 655 - DNA, 15 bp, synthetic construct
  source 1..15: mol_type = other DNA
ttagccatgtggcct

SEQ ID NO: 656 - DNA, 15 bp, synthetic construct
  source 1..15: mol_type = other DNA
aacaccagcgagtag

SEQ ID NO: 657 - DNA, 15 bp, synthetic construct
  source 1..15: mol_type = other DNA
gcatgcacataggct

SEQ ID NO: 658 - DNA, 15 bp, synthetic construct
  source 1..15: mol_type = other DNA
atgggtgccatagat

SEQ ID NO: 659 - DNA, 15 bp, synthetic construct
  source 1..15: mol_type = other DNA
aagaggaaagtcttt

SEQ ID NO: 660 - DNA, 15 bp, synthetic construct
  source 1..15: mol_type = other DNA
cagtgtttcttgctt

SEQ ID NO: 661 - DNA, 15 bp, synthetic construct
  source 1..15: mol_type = other DNA
tcgaggagtccttgt

SEQ ID NO: 662 - DNA, 15 bp, synthetic construct
  source 1..15: mol_type = other DNA
gggaacggatgtctc

SEQ ID NO: 663 - DNA, 15 bp, synthetic construct
  source 1..15: mol_type = other DNA
cttggctctgttggg

SEQ ID NO: 664 - DNA, 15 bp, synthetic construct
  source 1..15: mol_type = other DNA
ggttctaagtcagtg

SEQ ID NO: 665 - DNA, 15 bp, synthetic construct
  source 1..15: mol_type = other DNA
ttgctcgctcgggag

SEQ ID NO: 666 - DNA, 15 bp, synthetic construct
  source 1..15: mol_type = other DNA
atttagttgccctcc

SEQ ID NO: 667 - DNA, 15 bp, synthetic construct
  source 1..15: mol_type = other DNA
ccagaagagaaaata

SEQ ID NO: 668 - DNA, 15 bp, synthetic construct
  source 1..15: mol_type = other DNA
ccttcgttgcttcct

SEQ ID NO: 669 - DNA, 15 bp, synthetic construct
  source 1..15: mol_type = other DNA
accgaagcagagttt

SEQ ID NO: 670 - DNA, 15 bp, synthetic construct
  source 1..15: mol_type = other DNA
tgtagtgaagggaag

SEQ ID NO: 671 - DNA, 15 bp, synthetic construct
  source 1..15: mol_type = other DNA
tttcaggcttccctc

SEQ ID NO: 672 - DNA, 15 bp, synthetic construct
  source 1..15: mol_type = other DNA
actaagccatgtgca

SEQ ID NO: 673 - DNA, 15 bp, synthetic construct
  source 1..15: mol_type = other DNA
acagcatggacgaca

SEQ ID NO: 674 - DNA, 15 bp, synthetic construct
  source 1..15: mol_type = other DNA
tttatcaggatgagg

SEQ ID NO: 675 - DNA, 15 bp, synthetic construct
  source 1..15: mol_type = other DNA
cttttacaccaatcc

SEQ ID NO: 676 - DNA, 15 bp, synthetic construct
  source 1..15: mol_type = other DNA
atgagtaactaagag

SEQ ID NO: 677 - DNA, 15 bp, synthetic construct
  source 1..15: mol_type = other DNA
tgcatcctcatatgc

SEQ ID NO: 678 - DNA, 15 bp, synthetic construct
  source 1..15: mol_type = other DNA
aacctgttagagcta

SEQ ID NO: 679 - DNA, 15 bp, synthetic construct
  source 1..15: mol_type = other DNA
tccagagaagaagcc

SEQ ID NO: 680 - DNA, 15 bp, synthetic construct
  source 1..15: mol_type = other DNA
aagcttgcccatgca

SEQ ID NO: 681 - DNA, 15 bp, synthetic construct
  source 1..15: mol_type = other DNA
ctctgaggctttctt

SEQ ID NO: 682 - DNA, 15 bp, synthetic construct
  source 1..15: mol_type = other DNA
ggagcaatgccgtca

SEQ ID NO: 683 - DNA, 15 bp, synthetic construct
  source 1..15: mol_type = other DNA
ctcaccttacctgta

SEQ ID NO: 684 - DNA, 15 bp, synthetic construct
  source 1..15: mol_type = other DNA
cttgaagactaggga

SEQ ID NO: 685 - DNA, 15 bp, synthetic construct
  source 1..15: mol_type = other DNA
atacggaggctggta

SEQ ID NO: 686 - DNA, 15 bp, synthetic construct
  source 1..15: mol_type = other DNA
ggcttcctagctgca

SEQ ID NO: 687 - DNA, 15 bp, synthetic construct
  source 1..15: mol_type = other DNA
ttgcaacagagctcc

SEQ ID NO: 688 - DNA, 15 bp, synthetic construct
  source 1..15: mol_type = other DNA
gttagcttatcagcc

SEQ ID NO: 689 - DNA, 15 bp, synthetic construct
  source 1..15: mol_type = other DNA
tcgaacaaagtgtag

SEQ ID NO: 690 - DNA, 15 bp, synthetic construct
  source 1..15: mol_type = other DNA
tacgcccaaccacac

SEQ ID NO: 691 - DNA, 15 bp, synthetic construct
  source 1..15: mol_type = other DNA
aaaatgttgctctct

SEQ ID NO: 692 - DNA, 15 bp, synthetic construct
  source 1..15: mol_type = other DNA
ccactgaagaagctc

SEQ ID NO: 693 - DNA, 15 bp, synthetic construct
  source 1..15: mol_type = other DNA
gtgatgttgaagttg

SEQ ID NO: 694 - DNA, 15 bp, synthetic construct
  source 1..15: mol_type = other DNA
ggcggtaaaaccaca

SEQ ID NO: 695 - DNA, 15 bp, synthetic construct
  source 1..15: mol_type = other DNA
caaggtaacagaagc

SEQ ID NO: 696 - DNA, 15 bp, synthetic construct
  source 1..15: mol_type = other DNA
cagctgatgtccgct

SEQ ID NO: 697 - DNA, 15 bp, synthetic construct
  source 1..15: mol_type = other DNA
ccaggctttaaagtt

SEQ ID NO: 698 - DNA, 15 bp, synthetic construct
  source 1..15: mol_type = other DNA
ttgcggaacttgacg

SEQ ID NO: 699 - DNA, 15 bp, synthetic construct
  source 1..15: mol_type = other DNA
gctctaaccggccct

SEQ ID NO: 700 - DNA, 15 bp, synthetic construct
  source 1..15: mol_type = other DNA
gaccacgaccacagc

SEQ ID NO: 701 - DNA, 15 bp, synthetic construct
  source 1..15: mol_type = other DNA
ggacaatagcctctg

SEQ ID NO: 702 - DNA, 15 bp, synthetic construct
  source 1..15: mol_type = other DNA
ttgagcctcttgaaa

SEQ ID NO: 703 - DNA, 15 bp, synthetic construct
  source 1..15: mol_type = other DNA
aacaaagaacaagct

SEQ ID NO: 704 - DNA, 15 bp, synthetic construct
  source 1..15: mol_type = other DNA
gagtctgtgggaggc

SEQ ID NO: 705 - DNA, 15 bp, synthetic construct
  source 1..15: mol_type = other DNA
gtatccagatgccca

SEQ ID NO: 706 - DNA, 15 bp, synthetic construct
  source 1..15: mol_type = other DNA
tccgatgtaatcgtc

SEQ ID NO: 707 - DNA, 15 bp, synthetic construct
  source 1..15: mol_type = other DNA
catcgcttgctcact

SEQ ID NO: 708 - DNA, 15 bp, synthetic construct
  source 1..15: mol_type = other DNA
gagttgcttactgag

SEQ ID NO: 709 - DNA, 15 bp, synthetic construct
  source 1..15: mol_type = other DNA
acttggccgcgctgt

SEQ ID NO: 710 - DNA, 15 bp, synthetic construct
  source 1..15: mol_type = other DNA
catctgttggcacca

SEQ ID NO: 711 - DNA, 15 bp, synthetic construct
  source 1..15: mol_type = other DNA
ctgagatcgagcact

SEQ ID NO: 712 - DNA, 15 bp, synthetic construct
  source 1..15: mol_type = other DNA
aagctggaaagtgca

SEQ ID NO: 713 - DNA, 15 bp, synthetic construct
  source 1..15: mol_type = other DNA
catactgccgcgggt

SEQ ID NO: 714 - DNA, 15 bp, synthetic construct
  source 1..15: mol_type = other DNA
tgttgatctcctgcc

SEQ ID NO: 715 - DNA, 15 bp, synthetic construct
  source 1..15: mol_type = other DNA
gtccattcattattc

SEQ ID NO: 716 - DNA, 15 bp, synthetic construct
  source 1..15: mol_type = other DNA
ccacctctactgcag

SEQ ID NO: 717 - DNA, 15 bp, synthetic construct
  source 1..15: mol_type = other DNA
cagtaccttgaggcc

SEQ ID NO: 718 - DNA, 15 bp, synthetic construct
  source 1..15: mol_type = other DNA
cgcagcggaaatctt

SEQ ID NO: 719 - DNA, 15 bp, synthetic construct
  source 1..15: mol_type = other DNA
ggcgggagtacgcta

SEQ ID NO: 720 - DNA, 15 bp, synthetic construct
  source 1..15: mol_type = other DNA
tggcgtggtcgcaga

SEQ ID NO: 721 - DNA, 15 bp, synthetic construct
  source 1..15: mol_type = other DNA
tgtaatcctgggatg

SEQ ID NO: 722 - DNA, 15 bp, synthetic construct
  source 1..15: mol_type = other DNA
tctttaggtcctcga

SEQ ID NO: 723 - DNA, 15 bp, synthetic construct
  source 1..15: mol_type = other DNA
aggaaaaggcaggcg

SEQ ID NO: 724 - DNA, 15 bp, synthetic construct
  source 1..15: mol_type = other DNA
agacaggtctaggct

SEQ ID NO: 725 - DNA, 15 bp, synthetic construct
  source 1..15: mol_type = other DNA
tttcctacacagcgg

SEQ ID NO: 726 - DNA, 15 bp, synthetic construct
  source 1..15: mol_type = other DNA
gcagcgctagattct

SEQ ID NO: 727 - DNA, 15 bp, synthetic construct
  source 1..15: mol_type = other DNA
agattgagggagttc

SEQ ID NO: 728 - DNA, 15 bp, synthetic construct
  source 1..15: mol_type = other DNA
agtcctcaacgtcct

SEQ ID NO: 729 - DNA, 15 bp, synthetic construct
  source 1..15: mol_type = other DNA
ttccgaacctctgag

SEQ ID NO: 730 - DNA, 15 bp, synthetic construct
  source 1..15: mol_type = other DNA
aaacggctctaggtt

SEQ ID NO: 731 - DNA, 15 bp, synthetic construct
  source 1..15: mol_type = other DNA
ggagcgctagggttt

SEQ ID NO: 732 - DNA, 15 bp, synthetic construct
  source 1..15: mol_type = other DNA
cagtgtcaggttatc

SEQ ID NO: 733 - DNA, 15 bp, synthetic construct
  source 1..15: mol_type = other DNA
atccaaatgcgtcca

SEQ ID NO: 734 - DNA, 15 bp, synthetic construct
  source 1..15: mol_type = other DNA
aaaaagggaagtcat

SEQ ID NO: 735 - DNA, 15 bp, synthetic construct
  source 1..15: mol_type = other DNA
ctgccaaatgcggga

SEQ ID NO: 736 - DNA, 15 bp, synthetic construct
  source 1..15: mol_type = other DNA
gctgactcatgggaa

SEQ ID NO: 737 - DNA, 15 bp, synthetic construct
  source 1..15: mol_type = other DNA
tgacaaaatgtcttc

SEQ ID NO: 738 - DNA, 15 bp, synthetic construct
  source 1..15: mol_type = other DNA
acagcacttccacat

SEQ ID NO: 739 - DNA, 15 bp, synthetic construct
  source 1..15: mol_type = other DNA
ggaatggtaggcctt

SEQ ID NO: 740 - DNA, 15 bp, synthetic construct
  source 1..15: mol_type = other DNA
aggacagtgtttggg

SEQ ID NO: 741 - DNA, 15 bp, synthetic construct
  source 1..15: mol_type = other DNA
catatcggtccagtc

SEQ ID NO: 742 - DNA, 15 bp, synthetic construct
  source 1..15: mol_type = other DNA
ctaacagtctctgaa

SEQ ID NO: 743 - DNA, 15 bp, synthetic construct
  source 1..15: mol_type = other DNA
agagaccgcttccat

SEQ ID NO: 744 - DNA, 15 bp, synthetic construct
  source 1..15: mol_type = other DNA
aatggcctctccaca

SEQ ID NO: 745 - DNA, 15 bp, synthetic construct
  source 1..15: mol_type = other DNA
ctccatctaccagtc

SEQ ID NO: 746 - DNA, 15 bp, synthetic construct
  source 1..15: mol_type = other DNA
gaagttgaccactct

SEQ ID NO: 747 - DNA, 15 bp, synthetic construct
  source 1..15: mol_type = other DNA
agcaccattctgagt

SEQ ID NO: 748 - DNA, 15 bp, synthetic construct
  source 1..15: mol_type = other DNA
tgctactcttgccaa

SEQ ID NO: 749 - DNA, 15 bp, synthetic construct
  source 1..15: mol_type = other DNA
caaggatcccgactg

SEQ ID NO: 750 - DNA, 15 bp, synthetic construct
  source 1..15: mol_type = other DNA
cctgagcatcgtcca

SEQ ID NO: 751 - DNA, 15 bp, synthetic construct
  source 1..15: mol_type = other DNA
ggctcagaatggcct

SEQ ID NO: 752 - DNA, 15 bp, synthetic construct
  source 1..15: mol_type = other DNA
caggtaagtccaccc

SEQ ID NO: 753 - DNA, 15 bp, synthetic construct
  source 1..15: mol_type = other DNA
gcatcttcattgtga

SEQ ID NO: 754 - DNA, 15 bp, synthetic construct
  source 1..15: mol_type = other DNA
ttggtccagagcctt

SEQ ID NO: 755 - DNA, 15 bp, synthetic construct
  source 1..15: mol_type = other DNA
ccagatctgatccat

SEQ ID NO: 756 - DNA, 15 bp, synthetic construct
  source 1..15: mol_type = other DNA
ttcaggcaagaattc

SEQ ID NO: 757 - DNA, 15 bp, synthetic construct
  source 1..15: mol_type = other DNA
acgttgaagatgaaa

SEQ ID NO: 758 - DNA, 15 bp, synthetic construct
  source 1..15: mol_type = other DNA
cccacatatctctgg

SEQ ID NO: 759 - DNA, 15 bp, synthetic construct
  source 1..15: mol_type = other DNA
gacttgaggagatcc

SEQ ID NO: 760 - DNA, 15 bp, synthetic construct
  source 1..15: mol_type = other DNA
ccgaaacattccacc

SEQ ID NO: 761 - DNA, 15 bp, synthetic construct
  source 1..15: mol_type = other DNA
ccgtactggttctgg

SEQ ID NO: 762 - DNA, 15 bp, synthetic construct
  source 1..15: mol_type = other DNA
aagggtttaagcggg

SEQ ID NO: 763 - DNA, 15 bp, synthetic construct
  source 1..15: mol_type = other DNA
gcagaagatcagata

SEQ ID NO: 764 - DNA, 15 bp, synthetic construct
  source 1..15: mol_type = other DNA
ccacacatacagctt

SEQ ID NO: 765 - DNA, 15 bp, synthetic construct
  source 1..15: mol_type = other DNA
ccatgttctcataag

SEQ ID NO: 766 - DNA, 15 bp, synthetic construct
  source 1..15: mol_type = other DNA
gttgccacggtgaca

SEQ ID NO: 767 - DNA, 15 bp, synthetic construct
  source 1..15: mol_type = other DNA
ggcatgtatacacac

SEQ ID NO: 768 - DNA, 15 bp, synthetic construct
  source 1..15: mol_type = other DNA
ctcataggactggga

SEQ ID NO: 769 - DNA, 15 bp, synthetic construct
  source 1..15: mol_type = other DNA
tcttcagatttcaga

SEQ ID NO: 770 - DNA, 15 bp, synthetic construct
  source 1..15: mol_type = other DNA
atattctgacttcct

SEQ ID NO: 771 - DNA, 15 bp, synthetic construct
  source 1..15: mol_type = other DNA
gatgattgagtagat

SEQ ID NO: 772 - DNA, 15 bp, synthetic construct
  source 1..15: mol_type = other DNA
ctgtatgtgcctgtc

SEQ ID NO: 773 - DNA, 15 bp, synthetic construct
  source 1..15: mol_type = other DNA
gtttagccaaggcta

SEQ ID NO: 774 - DNA, 15 bp, synthetic construct
  source 1..15: mol_type = other DNA
ccgcatccatgtcac

SEQ ID NO: 775 - DNA, 15 bp, synthetic construct
  source 1..15: mol_type = other DNA
cccatcagcattagg

SEQ ID NO: 776 - DNA, 15 bp, synthetic construct
  source 1..15: mol_type = other DNA
gttaatccaaagagg

SEQ ID NO: 777 - DNA, 15 bp, synthetic construct
  source 1..15: mol_type = other DNA
ggagctaaaggagag

SEQ ID NO: 778 - DNA, 15 bp, synthetic construct
  source 1..15: mol_type = other DNA
ctggatgacatggaa

SEQ ID NO: 779 - DNA, 15 bp, synthetic construct
  source 1..15: mol_type = other DNA
gggcaagtgcttctt

SEQ ID NO: 780 - DNA, 15 bp, synthetic construct
  source 1..15: mol_type = other DNA
ctatattgtactagg

SEQ ID NO: 781 - DNA, 15 bp, synthetic construct
  source 1..15: mol_type = other DNA
ttatcatgatccttg

SEQ ID NO: 782 - DNA, 15 bp, synthetic construct
  source 1..15: mol_type = other DNA
ttctggaaactcagt

SEQ ID NO: 783 - DNA, 15 bp, synthetic construct
  source 1..15: mol_type = other DNA
tgtacttcaaaggga

SEQ ID NO: 784 - DNA, 15 bp, synthetic construct
  source 1..15: mol_type = other DNA
gaaaattattgtgcc

SEQ ID NO: 785 - DNA, 15 bp, synthetic construct
  source 1..15: mol_type = other DNA
tcaaggaagatcgtt

SEQ ID NO: 786 - DNA, 15 bp, synthetic construct
  source 1..15: mol_type = other DNA
ttcatggaaaagtgg

SEQ ID NO: 787 - DNA, 15 bp, synthetic construct
  source 1..15: mol_type = other DNA
acctgaaagaagcct

SEQ ID NO: 788 - DNA, 15 bp, synthetic construct
  source 1..15: mol_type = other DNA
atcacatgtaacttg

SEQ ID NO: 789 - DNA, 15 bp, synthetic construct
  source 1..15: mol_type = other DNA
agcacaacggttgcc

SEQ ID NO: 790 - DNA, 15 bp, synthetic construct
  source 1..15: mol_type = other DNA
cggaggcatgacaaa

SEQ ID NO: 791 - DNA, 15 bp, synthetic construct
  source 1..15: mol_type = other DNA
caagggcactatcac

SEQ ID NO: 792 - DNA, 15 bp, synthetic construct
  source 1..15: mol_type = other DNA
aaatctcttgttcct

SEQ ID NO: 793 - DNA, 15 bp, synthetic construct
  source 1..15: mol_type = other DNA
ttcaggagagtggac

SEQ ID NO: 794 - DNA, 15 bp, synthetic construct
  source 1..15: mol_type = other DNA
ttttccttttggtga

SEQ ID NO: 795 - DNA, 15 bp, synthetic construct
  source 1..15: mol_type = other DNA
tgcctgggaacgatg

SEQ ID NO: 796 - DNA, 15 bp, synthetic construct
  source 1..15: mol_type = other DNA
atctttggttttgag

SEQ ID NO: 797 - DNA, 15 bp, synthetic construct
  source 1..15: mol_type = other DNA
ctcggtcctctacca

SEQ ID NO: 798 - DNA, 15 bp, synthetic construct
  source 1..15: mol_type = other DNA
aaggaactgaagtga

SEQ ID NO: 799 - DNA, 15 bp, synthetic construct
  source 1..15: mol_type = other DNA
acatgacctgagagg

SEQ ID NO: 800 - DNA, 15 bp, synthetic construct
  source 1..15: mol_type = other DNA
agatgcagaggtggc

SEQ ID NO: 801 - DNA, 15 bp, synthetic construct
  source 1..15: mol_type = other DNA
gatggtgggcaagtg

SEQ ID NO: 802 - DNA, 15 bp, synthetic construct
  source 1..15: mol_type = other DNA
tttacatggaaagct

SEQ ID NO: 803 - DNA, 15 bp, synthetic construct
  source 1..15: mol_type = other DNA
cttgctgactttgtt

SEQ ID NO: 804 - DNA, 15 bp, synthetic construct
  source 1..15: mol_type = other DNA
cagtgctttttattg

SEQ ID NO: 805 - DNA, 15 bp, synthetic construct
  source 1..15: mol_type = other DNA
gggtcagttccattc

SEQ ID NO: 806 - DNA, 15 bp, synthetic construct
  source 1..15: mol_type = other DNA
acaaagaccatcaag

SEQ ID NO: 807 - DNA, 15 bp, synthetic construct
  source 1..15: mol_type = other DNA
tgatgagatagatgt

SEQ ID NO: 808 - DNA, 15 bp, synthetic construct
  source 1..15: mol_type = other DNA
cttgtagtgagaccc

SEQ ID NO: 809 - DNA, 15 bp, synthetic construct
  source 1..15: mol_type = other DNA
tctgcacacagaaaa

SEQ ID NO: 810 - DNA, 15 bp, synthetic construct
  source 1..15: mol_type = other DNA
tcgtaatctctttgg

SEQ ID NO: 811 - DNA, 15 bp, synthetic construct
  source 1..15: mol_type = other DNA
ttgatgtcctgaccc

SEQ ID NO: 812 - DNA, 15 bp, synthetic construct
  source 1..15: mol_type = other DNA
ttttagatgtttccc

SEQ ID NO: 813 - DNA, 15 bp, synthetic construct
  source 1..15: mol_type = other DNA
aatagcacccacact

SEQ ID NO: 814 - DNA, 15 bp, synthetic construct
  source 1..15: mol_type = other DNA
ctccagatgttgacc

SEQ ID NO: 815 - DNA, 15 bp, synthetic construct
  source 1..15: mol_type = other DNA
tcatcggtcttcaga

SEQ ID NO: 816 - DNA, 15 bp, synthetic construct
  source 1..15: mol_type = other DNA
ttttgcactcaggct

SEQ ID NO: 817 - DNA, 15 bp, synthetic construct
  source 1..15: mol_type = other DNA
ctggtgtgatggagc

SEQ ID NO: 818 - DNA, 15 bp, synthetic construct
  source 1..15: mol_type = other DNA
tcctgtcgagcgctg

SEQ ID NO: 819 - DNA, 15 bp, synthetic construct
  source 1..15: mol_type = other DNA
tccctcagaaagagg

SEQ ID NO: 820 - DNA, 15 bp, synthetic construct
  source 1..15: mol_type = other DNA
gcgcgttactgctcc

SEQ ID NO: 821 - DNA, 15 bp, synthetic construct
  source 1..15: mol_type = other DNA
tcatcacgctggccc

SEQ ID NO: 822 - DNA, 15 bp, synthetic construct
  source 1..15: mol_type = other DNA
agtcttctgagtccc

SEQ ID NO: 823 - DNA, 15 bp, synthetic construct
  source 1..15: mol_type = other DNA
tcccatgtgttgggt

SEQ ID NO: 824 - DNA, 15 bp, synthetic construct
  source 1..15: mol_type = other DNA
aggtttggagctaaa

SEQ ID NO: 825 - DNA, 15 bp, synthetic construct
  source 1..15: mol_type = other DNA
aactcagctgtgaga

SEQ ID NO: 826 - DNA, 15 bp, synthetic construct
  source 1..15: mol_type = other DNA
gaaaaggagtctctg

SEQ ID NO: 827 - DNA, 15 bp, synthetic construct
  source 1..15: mol_type = other DNA
tatagcaggtcatat

SEQ ID NO: 828 - DNA, 15 bp, synthetic construct
  source 1..15: mol_type = other DNA
atctcactgtaggcc

SEQ ID NO: 829 - DNA, 15 bp, synthetic construct
  source 1..15: mol_type = other DNA
ttttgcaggatgcca

SEQ ID NO: 830 - DNA, 15 bp, synthetic construct
  source 1..15: mol_type = other DNA
ccaaaacatcgtact

SEQ ID NO: 831 - DNA, 15 bp, synthetic construct
  source 1..15: mol_type = other DNA
aggattccatccagc

SEQ ID NO: 832 - DNA, 15 bp, synthetic construct
  source 1..15: mol_type = other DNA
aggccgcacacaagg

SEQ ID NO: 833 - DNA, 15 bp, synthetic construct
  source 1..15: mol_type = other DNA
agttcaatggtgcgg

SEQ ID NO: 834 - DNA, 15 bp, synthetic construct
  source 1..15: mol_type = other DNA
gtgaatcaacggcct

SEQ ID NO: 835 - DNA, 15 bp, synthetic construct
  source 1..15: mol_type = other DNA
taacaatgctgccct

SEQ ID NO: 836 - DNA, 15 bp, synthetic construct
  source 1..15: mol_type = other DNA
atcctagtacattga

SEQ ID NO: 837 - DNA, 15 bp, synthetic construct
  source 1..15: mol_type = other DNA
aaatttacagcagga

SEQ ID NO: 838 - DNA, 15 bp, synthetic construct
  source 1..15: mol_type = other DNA
gtaaatgcttcatcc

SEQ ID NO: 839 - DNA, 15 bp, synthetic construct
  source 1..15: mol_type = other DNA
gtctgttcatcttct

SEQ ID NO: 840 - DNA, 15 bp, synthetic construct
  source 1..15: mol_type = other DNA
gatctcccatctgag

SEQ ID NO: 841 - DNA, 15 bp, synthetic construct
  source 1..15: mol_type = other DNA
attacatggtagcta

SEQ ID NO: 842 - DNA, 15 bp, synthetic construct
  source 1..15: mol_type = other DNA
aggaacattccagag

SEQ ID NO: 843 - DNA, 15 bp, synthetic construct
  source 1..15: mol_type = other DNA
ttgatggaggaacag

SEQ ID NO: 844 - DNA, 15 bp, synthetic construct
  source 1..15: mol_type = other DNA
aatcctcctggatgg

SEQ ID NO: 845 - DNA, 15 bp, synthetic construct
  source 1..15: mol_type = other DNA
tcggtgcactccttg

SEQ ID NO: 846 - DNA, 15 bp, synthetic construct
  source 1..15: mol_type = other DNA
cagctctcacagtgg

SEQ ID NO: 847 - DNA, 15 bp, synthetic construct
  source 1..15: mol_type = other DNA
cactcagcattggca

SEQ ID NO: 848 - DNA, 15 bp, synthetic construct
  source 1..15: mol_type = other DNA
cttgtagcatgtggg

SEQ ID NO: 849 - DNA, 15 bp, synthetic construct
  source 1..15: mol_type = other DNA
cggtcagcgaagggt

SEQ ID NO: 850 - DNA, 15 bp, synthetic construct
  source 1..15: mol_type = other DNA
ctgtcacgtgtacac

SEQ ID NO: 851 - DNA, 15 bp, synthetic construct
  source 1..15: mol_type = other DNA
aatcggagctgcaca

SEQ ID NO: 852 - DNA, 15 bp, synthetic construct
  source 1..15: mol_type = other DNA
gactgcagttgtggc

SEQ ID NO: 853 - DNA, 15 bp, synthetic construct
  source 1..15: mol_type = other DNA
cctttctatgctggt

SEQ ID NO: 854 - DNA, 15 bp, synthetic construct
  source 1..15: mol_type = other DNA
tgtcctcgtccctgc

SEQ ID NO: 855 - DNA, 15 bp, synthetic construct
  source 1..15: mol_type = other DNA
gtttttctactggga

SEQ ID NO: 856 - DNA, 15 bp, synthetic construct
  source 1..15: mol_type = other DNA
atgtcagtgctacac

SEQ ID NO: 857 - DNA, 15 bp, synthetic construct
  source 1..15: mol_type = other DNA
cacattggcctattt

SEQ ID NO: 858 - DNA, 15 bp, synthetic construct
  source 1..15: mol_type = other DNA
gattcaatgcctggc

SEQ ID NO: 859 - DNA, 15 bp, synthetic construct
  source 1..15: mol_type = other DNA
gtcactgcttgtcca

SEQ ID NO: 860 - DNA, 15 bp, synthetic construct
  source 1..15: mol_type = other DNA
gtgccagaggtagtt

SEQ ID NO: 861 - DNA, 15 bp, synthetic construct
  source 1..15: mol_type = other DNA
ggttccattttcagt

SEQ ID NO: 862 - DNA, 15 bp, synthetic construct
  source 1..15: mol_type = other DNA
tctgaagtgcagcat

SEQ ID NO: 863 - DNA, 15 bp, synthetic construct
  source 1..15: mol_type = other DNA
gttcatgttcagagg

SEQ ID NO: 864 - DNA, 15 bp, synthetic construct
  source 1..15: mol_type = other DNA
atcttggatgccaca

SEQ ID NO: 865 - DNA, 15 bp, synthetic construct
  source 1..15: mol_type = other DNA
tcaagcacaacgaat

SEQ ID NO: 866 - DNA, 15 bp, synthetic construct
  source 1..15: mol_type = other DNA
gtaccaagtaacaaa

SEQ ID NO: 867 - DNA, 15 bp, synthetic construct
  source 1..15: mol_type = other DNA
ctcagtgtgctggtc

SEQ ID NO: 868 - DNA, 15 bp, synthetic construct
  source 1..15: mol_type = other DNA
gtccttgggaaccgt

SEQ ID NO: 869 - DNA, 15 bp, synthetic construct
  source 1..15: mol_type = other DNA
ctatgctgaaccttc

SEQ ID NO: 870 - DNA, 15 bp, synthetic construct
  source 1..15: mol_type = other DNA
gcagttgcttctgga

SEQ ID NO: 871 - DNA, 15 bp, synthetic construct
  source 1..15: mol_type = other DNA
ttcctcaggatctaa

SEQ ID NO: 872 - DNA, 15 bp, synthetic construct
  source 1..15: mol_type = other DNA
tgcacagacacttga

SEQ ID NO: 873 - DNA, 15 bp, synthetic construct
  source 1..15: mol_type = other DNA
agcgatgaaatgaga

SEQ ID NO: 874 - DNA, 15 bp, synthetic construct
  source 1..15: mol_type = other DNA
actgccggaatttcc

SEQ ID NO: 875 - DNA, 15 bp, synthetic construct
  source 1..15: mol_type = other DNA
gctcccagaattacc

SEQ ID NO: 876 - DNA, 15 bp, synthetic construct
  source 1..15: mol_type = other DNA
tgcagcggtacaccc

SEQ ID NO: 877 - DNA, 15 bp, synthetic construct
  source 1..15: mol_type = other DNA
tcgcttgtagtcggc

SEQ ID NO: 878 - DNA, 15 bp, synthetic construct
  source 1..15: mol_type = other DNA
tatgtgccttgctca

SEQ ID NO: 879 - DNA, 15 bp, synthetic construct
  source 1..15: mol_type = other DNA
agccctgctcgttgg

SEQ ID NO: 880 - DNA, 15 bp, synthetic construct
  source 1..15: mol_type = other DNA
gaatcatgtccattg

SEQ ID NO: 881 - DNA, 15 bp, synthetic construct
  source 1..15: mol_type = other DNA
tgacctatctcctgt

SEQ ID NO: 882 - DNA, 15 bp, synthetic construct
  source 1..15: mol_type = other DNA
agtgatgcaggctac

SEQ ID NO: 883 - DNA, 15 bp, synthetic construct
  source 1..15: mol_type = other DNA
gtttggtgtctgtca

SEQ ID NO: 884 - DNA, 15 bp, synthetic construct
  source 1..15: mol_type = other DNA
tcctttggagaagga

SEQ ID NO: 885 - DNA, 15 bp, synthetic construct
  source 1..15: mol_type = other DNA
cctgcttaagcctct

SEQ ID NO: 886 - DNA, 15 bp, synthetic construct
  source 1..15: mol_type = other DNA
gcttcaacacgggac

SEQ ID NO: 887 - DNA, 15 bp, synthetic construct
  source 1..15: mol_type = other DNA
cccggatgctcacga

SEQ ID NO: 888 - DNA, 15 bp, synthetic construct
  source 1..15: mol_type = other DNA
acatctgtagttgct

SEQ ID NO: 889 - DNA, 15 bp, synthetic construct
  source 1..15: mol_type = other DNA
tgtactgtgtcccta

SEQ ID NO: 890 - DNA, 15 bp, synthetic construct
  source 1..15: mol_type = other DNA
tagacctaggagtga

SEQ ID NO: 891 - DNA, 15 bp, synthetic construct
  source 1..15: mol_type = other DNA
agcacacgaaagcca

SEQ ID NO: 892 - DNA, 15 bp, synthetic construct
  source 1..15: mol_type = other DNA
gagaaacaaggccgg

SEQ ID NO: 893 - DNA, 15 bp, synthetic construct
  source 1..15: mol_type = other DNA
ttactaaccacccac

SEQ ID NO: 894 - DNA, 15 bp, synthetic construct
  source 1..15: mol_type = other DNA
attatgggtgggatg

SEQ ID NO: 895 - DNA, 15 bp, synthetic construct
  source 1..15: mol_type = other DNA
agagctgtgcgcatc

SEQ ID NO: 896 - DNA, 15 bp, synthetic construct
  source 1..15: mol_type = other DNA
agaatccaggtaagt

SEQ ID NO: 897 - DNA, 15 bp, synthetic construct
  source 1..15: mol_type = other DNA
aaataaggcagcagg

SEQ ID NO: 898 - DNA, 15 bp, synthetic construct
  source 1..15: mol_type = other DNA
ttctatgcaggtgga

SEQ ID NO: 899 - DNA, 15 bp, synthetic construct
  source 1..15: mol_type = other DNA
tggacaccaccagat

SEQ ID NO: 900 - DNA, 15 bp, synthetic construct
  source 1..15: mol_type = other DNA
ctcatgctgcccacg

SEQ ID NO: 901 - DNA, 15 bp, synthetic construct
  source 1..15: mol_type = other DNA
cactctaccagaggc

SEQ ID NO: 902 - DNA, 15 bp, synthetic construct
  source 1..15: mol_type = other DNA
ttatctccatctgcc

SEQ ID NO: 903 - DNA, 15 bp, synthetic construct
  source 1..15: mol_type = other DNA
tgcagcatttcacac

SEQ ID NO: 904 - DNA, 15 bp, synthetic construct
  source 1..15: mol_type = other DNA
aagggatgcccggaa

SEQ ID NO: 905 - DNA, 15 bp, synthetic construct
  source 1..15: mol_type = other DNA
cgaagtcgcgtggtg

SEQ ID NO: 906 - DNA, 15 bp, synthetic construct
  source 1..15: mol_type = other DNA
attggcattggtggc

SEQ ID NO: 907 - DNA, 15 bp, synthetic construct
  source 1..15: mol_type = other DNA
atgggctagggttcc

SEQ ID NO: 908 - DNA, 15 bp, synthetic construct
  source 1..15: mol_type = other DNA
tggttccattgctct

SEQ ID NO: 909 - DNA, 15 bp, synthetic construct
  source 1..15: mol_type = other DNA
ctctaatctccagca

SEQ ID NO: 910 - DNA, 15 bp, synthetic construct
  source 1..15: mol_type = other DNA
ccatgaggaccggtg

SEQ ID NO: 911 - DNA, 15 bp, synthetic construct
  source 1..15: mol_type = other DNA
ctatagcaagccagg

SEQ ID NO: 912 - DNA, 15 bp, synthetic construct
  source 1..15: mol_type = other DNA
cccatatacaacaca

SEQ ID NO: 913 - DNA, 15 bp, synthetic construct
  source 1..15: mol_type = other DNA
gagagccaagagcag

SEQ ID NO: 914 - DNA, 15 bp, synthetic construct
  source 1..15: mol_type = other DNA
caaatggtgagggcc

SEQ ID NO: 915 - DNA, 15 bp, synthetic construct
  source 1..15: mol_type = other DNA
gtccgggaaataggg

SEQ ID NO: 916 - DNA, 15 bp, synthetic construct
  source 1..15: mol_type = other DNA
tcatccacggccacc

SEQ ID NO: 917 - DNA, 15 bp, synthetic construct
  source 1..15: mol_type = other DNA
ggaactgaaagacgc

SEQ ID NO: 918 - DNA, 15 bp, synthetic construct
  source 1..15: mol_type = other DNA
ctagcctgacatctc

SEQ ID NO: 919 - DNA, 15 bp, synthetic construct
  source 1..15: mol_type = other DNA
gcattgtcgtacgct

SEQ ID NO: 920 - DNA, 15 bp, synthetic construct
  source 1..15: mol_type = other DNA
gaggatacataactt

SEQ ID NO: 921 - DNA, 15 bp, synthetic construct
  source 1..15: mol_type = other DNA
ctttccacaacccac

SEQ ID NO: 922 - DNA, 15 bp, synthetic construct
  source 1..15: mol_type = other DNA
tgagggaatccctca

SEQ ID NO: 923 - DNA, 15 bp, synthetic construct
  source 1..15: mol_type = other DNA
actgattcattgccc

SEQ ID NO: 924 - DNA, 15 bp, synthetic construct
  source 1..15: mol_type = other DNA
gcttcaccaaaatct

SEQ ID NO: 925 - DNA, 15 bp, synthetic construct
  source 1..15: mol_type = other DNA
taaaagtgggaggtg

SEQ ID NO: 926 - DNA, 15 bp, synthetic construct
  source 1..15: mol_type = other DNA
tcagtatccaggtct

SEQ ID NO: 927 - DNA, 15 bp, synthetic construct
  source 1..15: mol_type = other DNA
ccgaggagtgagtag

SEQ ID NO: 928 - DNA, 15 bp, synthetic construct
  source 1..15: mol_type = other DNA
accattatccctcct

SEQ ID NO: 929 - DNA, 15 bp, synthetic construct
  source 1..15: mol_type = other DNA
actagagacaactcc

SEQ ID NO: 930 - DNA, 15 bp, synthetic construct
  source 1..15: mol_type = other DNA
cctggtgcttctcca

SEQ ID NO: 931 - DNA, 15 bp, synthetic construct
  source 1..15: mol_type = other DNA
ctccagcgaacttca

SEQ ID NO: 932 - DNA, 15 bp, synthetic construct
  source 1..15: mol_type = other DNA
ggatccatagccagg

SEQ ID NO: 933 - DNA, 15 bp, synthetic construct
  source 1..15: mol_type = other DNA
ctctctgcttgcaaa

SEQ ID NO: 934 - DNA, 15 bp, synthetic construct
  source 1..15: mol_type = other DNA
gggtgttaaatctcc

SEQ ID NO: 935 - DNA, 15 bp, synthetic construct
  source 1..15: mol_type = other DNA
agggctgtaacacca

SEQ ID NO: 936 - DNA, 15 bp, synthetic construct
  source 1..15: mol_type = other DNA
tcctaaacctgccta

SEQ ID NO: 937 - DNA, 15 bp, synthetic construct
  source 1..15: mol_type = other DNA
ggccatgtaacttgg

SEQ ID NO: 938 - DNA, 15 bp, synthetic construct
  source 1..15: mol_type = other DNA
tcggtggaggtgtcc

SEQ ID NO: 939 - DNA, 15 bp, synthetic construct
  source 1..15: mol_type = other DNA
ttgttgggttctgtg

SEQ ID NO: 940 - DNA, 15 bp, synthetic construct
  source 1..15: mol_type = other DNA
taatgcagctcctca

SEQ ID NO: 941 - DNA, 15 bp, synthetic construct
  source 1..15: mol_type = other DNA
cccattcttttccat

SEQ ID NO: 942 - DNA, 15 bp, synthetic construct
  source 1..15: mol_type = other DNA
tcttttcaatggcca

SEQ ID NO: 943 - DNA, 15 bp, synthetic construct
  source 1..15: mol_type = other DNA
ccgggttctagagtg

SEQ ID NO: 944 - DNA, 15 bp, synthetic construct
  source 1..15: mol_type = other DNA
tcttctagctgagcc

SEQ ID NO: 945 - DNA, 15 bp, synthetic construct
  source 1..15: mol_type = other DNA
tggaaggttaaggag

SEQ ID NO: 946 - DNA, 15 bp, synthetic construct
  source 1..15: mol_type = other DNA
taggacttcttatac

SEQ ID NO: 947 - DNA, 15 bp, synthetic construct
  source 1..15: mol_type = other DNA
tatgggatggaagaa

SEQ ID NO: 948 - DNA, 15 bp, synthetic construct
  source 1..15: mol_type = other DNA
gagctcttacactcc

SEQ ID NO: 949 - DNA, 15 bp, synthetic construct
  source 1..15: mol_type = other DNA
aaagcccacactacc

SEQ ID NO: 950 - DNA, 15 bp, synthetic construct
  source 1..15: mol_type = other DNA
cacttctctgatgcc

SEQ ID NO: 951 - DNA, 15 bp, synthetic construct
  source 1..15: mol_type = other DNA
tctggagttgaaacg

SEQ ID NO: 952 - DNA, 15 bp, synthetic construct
  source 1..15: mol_type = other DNA
gtggttgaaaggtct

SEQ ID NO: 953 - DNA, 15 bp, synthetic construct
  source 1..15: mol_type = other DNA
cccggatctttctgg

SEQ ID NO: 954 - DNA, 15 bp, synthetic construct
  source 1..15: mol_type = other DNA
ctaggtgttgtagtt

SEQ ID NO: 955 - DNA, 15 bp, synthetic construct
  source 1..15: mol_type = other DNA
gaaatagccagtgat

SEQ ID NO: 956 - DNA, 15 bp, synthetic construct
  source 1..15: mol_type = other DNA
caaagcgcggtccag

SEQ ID NO: 957 - DNA, 15 bp, synthetic construct
  source 1..15: mol_type = other DNA
agaagaccagagtct

SEQ ID NO: 958 - DNA, 15 bp, synthetic construct
  source 1..15: mol_type = other DNA
atcagaactgggtct

SEQ ID NO: 959 - DNA, 15 bp, synthetic construct
  source 1..15: mol_type = other DNA
tgtgactggacagaa

SEQ ID NO: 960 - DNA, 15 bp, synthetic construct
  source 1..15: mol_type = other DNA
gtcttttgggaatag

SEQ ID NO: 961 - DNA, 15 bp, synthetic construct
  source 1..15: mol_type = other DNA
gaagggatgagatgg

SEQ ID NO: 962 - DNA, 15 bp, synthetic construct
  source 1..15: mol_type = other DNA
atcttgctcagtgaa

SEQ ID NO: 963 - DNA, 15 bp, synthetic construct
  source 1..15: mol_type = other DNA
cgcaccgagtggaag

SEQ ID NO: 964 - DNA, 15 bp, synthetic construct
  source 1..15: mol_type = other DNA
accagcagtagacac

SEQ ID NO: 965 - DNA, 15 bp, synthetic construct
  source 1..15: mol_type = other DNA
ggaagcctgaacttc

SEQ ID NO: 966 - DNA, 15 bp, synthetic construct
  source 1..15: mol_type = other DNA
ggatggcagatggca

SEQ ID NO: 967 - DNA, 15 bp, synthetic construct
  source 1..15: mol_type = other DNA
gggtagcagtaccgt

SEQ ID NO: 968 - DNA, 15 bp, synthetic construct
  source 1..15: mol_type = other DNA
atagggtttagtggg

SEQ ID NO: 969 - DNA, 15 bp, synthetic construct
  source 1..15: mol_type = other DNA
catatctctcctttt

SEQ ID NO: 970 - DNA, 15 bp, synthetic construct
  source 1..15: mol_type = other DNA
tttgttcgggctcca

SEQ ID NO: 971 - DNA, 15 bp, synthetic construct
  source 1..15: mol_type = other DNA
gttggagtttgctgg

SEQ ID NO: 972 - DNA, 15 bp, synthetic construct
  source 1..15: mol_type = other DNA
gacaactttcctgtt

SEQ ID NO: 973 - DNA, 15 bp, synthetic construct
  source 1..15: mol_type = other DNA
attctacttctctgt

SEQ ID NO: 974 - DNA, 15 bp, synthetic construct
  source 1..15: mol_type = other DNA
taacttgaatgttgc

SEQ ID NO: 975 - DNA, 15 bp, synthetic construct
  source 1..15: mol_type = other DNA
ttttccttggctaga

SEQ ID NO: 976 - DNA, 15 bp, synthetic construct
  source 1..15: mol_type = other DNA
gatgccagttgaatg

SEQ ID NO: 977 - DNA, 15 bp, synthetic construct
  source 1..15: mol_type = other DNA
ttcaactggagaggc

SEQ ID NO: 978 - DNA, 15 bp, synthetic construct
  source 1..15: mol_type = other DNA
ctgtgaagttgtcag

SEQ ID NO: 979 - DNA, 15 bp, synthetic construct
  source 1..15: mol_type = other DNA
aaaactgccctttaa

SEQ ID NO: 980 - DNA, 15 bp, synthetic construct
  source 1..15: mol_type = other DNA
gtgtcagatcccagt

SEQ ID NO: 981 - DNA, 15 bp, synthetic construct
  source 1..15: mol_type = other DNA
cagtgactttcccaa

SEQ ID NO: 982 - DNA, 15 bp, synthetic construct
  source 1..15: mol_type = other DNA
gtctagcacaccata

SEQ ID NO: 983 - DNA, 15 bp, synthetic construct
  source 1..15: mol_type = other DNA
cctacactgcagtcc

SEQ ID NO: 984 - DNA, 15 bp, synthetic construct
  source 1..15: mol_type = other DNA
acaccaacactgagt

SEQ ID NO: 985 - DNA, 15 bp, synthetic construct
  source 1..15: mol_type = other DNA
cattagaatacctcc

SEQ ID NO: 986 - DNA, 15 bp, synthetic construct
  source 1..15: mol_type = other DNA
ctgagaactcagaaa

SEQ ID NO: 987 - DNA, 15 bp, synthetic construct
  source 1..15: mol_type = other DNA
tttgactgttagtgt

SEQ ID NO: 988 - DNA, 15 bp, synthetic construct
  source 1..15: mol_type = other DNA
atacacagggattcc

SEQ ID NO: 989 - DNA, 15 bp, synthetic construct
  source 1..15: mol_type = other DNA
cccataacagttctc

SEQ ID NO: 990 - DNA, 15 bp, synthetic construct
  source 1..15: mol_type = other DNA
tacagaaaatgagga

SEQ ID NO: 991 - DNA, 15 bp, synthetic construct
  source 1..15: mol_type = other DNA
ttctcaacaaaaggt

SEQ ID NO: 992 - DNA, 15 bp, synthetic construct
  source 1..15: mol_type = other DNA
tgccttctcatcacc

SEQ ID NO: 993 - DNA, 15 bp, synthetic construct
  source 1..15: mol_type = other DNA
gcccatttttcttgt

SEQ ID NO: 994 - DNA, 15 bp, synthetic construct
  source 1..15: mol_type = other DNA
tgcagccgttttgca

SEQ ID NO: 995 - DNA, 15 bp, synthetic construct
  source 1..15: mol_type = other DNA
cgaagatggcaccat

SEQ ID NO: 996 - DNA, 15 bp, synthetic construct
  source 1..15: mol_type = other DNA
tggtagtaacagggt

SEQ ID NO: 997 - DNA, 15 bp, synthetic construct
  source 1..15: mol_type = other DNA
atctatccttaaggt

SEQ ID NO: 998 - DNA, 15 bp, synthetic construct
  source 1..15: mol_type = other DNA
gggatccattgagca

SEQ ID NO: 999 - DNA, 15 bp, synthetic construct
  source 1..15: mol_type = other DNA
aacagggttgttgct

SEQ ID NO: 1000 - DNA, 15 bp, synthetic construct
  source 1..15: mol_type = other DNA
gagttcccaacttca

SEQ ID NO: 1001 - DNA, 15 bp, synthetic construct
  source 1..15: mol_type = other DNA
cttgcattctgatta

SEQ ID NO: 1002 - DNA, 15 bp, synthetic construct
  source 1..15: mol_type = other DNA
ttctctggttgcaaa

SEQ ID NO: 1003 - DNA, 15 bp, synthetic construct
  source 1..15: mol_type = other DNA
cacacgctgtacagg

SEQ ID NO: 1004 - DNA, 15 bp, synthetic construct
  source 1..15: mol_type = other DNA
cttcagtaatgttgc

SEQ ID NO: 1005 - DNA, 15 bp, synthetic construct
  source 1..15: mol_type = other DNA
caatgatggcccaaa

SEQ ID NO: 1006 - DNA, 15 bp, synthetic construct
  source 1..15: mol_type = other DNA
tttatggtgggatcc

SEQ ID NO: 1007 - DNA, 15 bp, synthetic construct
  source 1..15: mol_type = other DNA
ctctcctagagagcc

SEQ ID NO: 1008 - DNA, 15 bp, synthetic construct
  source 1..15: mol_type = other DNA
cagttggccataggg

SEQ ID NO: 1009 - DNA, 15 bp, synthetic construct
  source 1..15: mol_type = other DNA
cctagcagcgtgtcc

SEQ ID NO: 1010 - DNA, 15 bp, synthetic construct
  source 1..15: mol_type = other DNA
accatgtatcaccca

SEQ ID NO: 1011 - DNA, 15 bp, synthetic construct
  source 1..15: mol_type = other DNA
tgacgcatcgcgcca

SEQ ID NO: 1012 - DNA, 15 bp, synthetic construct
  source 1..15: mol_type = other DNA
gttggaactacaggg

SEQ ID NO: 1013 - DNA, 15 bp, synthetic construct
  source 1..15: mol_type = other DNA
catcccatacacttt

SEQ ID NO: 1014 - DNA, 15 bp, synthetic construct
  source 1..15: mol_type = other DNA
ccacaccatgtgagg

SEQ ID NO: 1015 - DNA, 15 bp, synthetic construct
  source 1..15: mol_type = other DNA
cctggactgaccatg

SEQ ID NO: 1016 - DNA, 15 bp, synthetic construct
  source 1..15: mol_type = other DNA
agtcccgaaagcagc

SEQ ID NO: 1017 - DNA, 15 bp, synthetic construct
  source 1..15: mol_type = other DNA
tcacagcactgttgg

SEQ ID NO: 1018 - DNA, 15 bp, synthetic construct
  source 1..15: mol_type = other DNA
ccagatcttttattc

SEQ ID NO: 1019 - DNA, 15 bp, synthetic construct
  source 1..15: mol_type = other DNA
agatgtgcaagatga

SEQ ID NO: 1020 - DNA, 15 bp, synthetic construct
  source 1..15: mol_type = other DNA
ccaagaagtaagtcg

SEQ ID NO: 1021 - DNA, 15 bp, synthetic construct
  source 1..15: mol_type = other DNA
gggagctaatggcaa

SEQ ID NO: 1022 - DNA, 15 bp, synthetic construct
  source 1..15: mol_type = other DNA
tcccaaagcaaggag

SEQ ID NO: 1023 - DNA, 15 bp, synthetic construct
  source 1..15: mol_type = other DNA
gctatgttccatctc

SEQ ID NO: 1024 - DNA, 15 bp, synthetic construct
  source 1..15: mol_type = other DNA
gagagcagtgttccc

SEQ ID NO: 1025 - DNA, 15 bp, synthetic construct
  source 1..15: mol_type = other DNA
ataggtatcttgaag

SEQ ID NO: 1026 - DNA, 15 bp, synthetic construct
  source 1..15: mol_type = other DNA
agtagataaagccag

SEQ ID NO: 1027 - DNA, 15 bp, synthetic construct
  source 1..15: mol_type = other DNA
tggtattgcaattca

SEQ ID NO: 1028 - DNA, 15 bp, synthetic construct
  source 1..15: mol_type = other DNA
tatattcctcgtggg

SEQ ID NO: 1029 - DNA, 15 bp, synthetic construct
  source 1..15: mol_type = other DNA
tccgagcccagtttc

SEQ ID NO: 1030 - DNA, 15 bp, synthetic construct
  source 1..15: mol_type = other DNA
attctttgtccttgt

SEQ ID NO: 1031 - DNA, 15 bp, synthetic construct
  source 1..15: mol_type = other DNA
catctcgatctcgga

SEQ ID NO: 1032 - DNA, 15 bp, synthetic construct
  source 1..15: mol_type = other DNA
gagcttgtgtgtcgg

SEQ ID NO: 1033 - DNA, 15 bp, synthetic construct
  source 1..15: mol_type = other DNA
ggctgcttctagaag

SEQ ID NO: 1034 - DNA, 15 bp, synthetic construct
  source 1..15: mol_type = other DNA
ccgacatcacatcca

SEQ ID NO: 1035 - DNA, 15 bp, synthetic construct
  source 1..15: mol_type = other DNA
aaaagttcgcatctt

SEQ ID NO: 1036 - DNA, 15 bp, synthetic construct
  source 1..15: mol_type = other DNA
atccaaagggaaggg

SEQ ID NO: 1037 - DNA, 15 bp, synthetic construct
  source 1..15: mol_type = other DNA
agtgacaggtgatcc

SEQ ID NO: 1038 - DNA, 15 bp, synthetic construct
  source 1..15: mol_type = other DNA
atcctcatcaccgcc

SEQ ID NO: 1039 - DNA, 15 bp, synthetic construct
  source 1..15: mol_type = other DNA
ggacggcgatagaaa

SEQ ID NO: 1040 - DNA, 15 bp, synthetic construct
  source 1..15: mol_type = other DNA
cttgctccagtagta

SEQ ID NO: 1041 - DNA, 15 bp, synthetic construct
  source 1..15: mol_type = other DNA
ggacaacttacatgc

SEQ ID NO: 1042 - DNA, 15 bp, synthetic construct
  source 1..15: mol_type = other DNA
gattcaggccagaat

SEQ ID NO: 1043 - DNA, 15 bp, synthetic construct
  source 1..15: mol_type = other DNA
tttcagatccaggat

SEQ ID NO: 1044 - DNA, 15 bp, synthetic construct
  source 1..15: mol_type = other DNA
ggtccaagactagcc

SEQ ID NO: 1045 - DNA, 15 bp, synthetic construct
  source 1..15: mol_type = other DNA
cagtggcctacagtg

SEQ ID NO: 1046 - DNA, 15 bp, synthetic construct
  source 1..15: mol_type = other DNA
tgtttcatgggactg

SEQ ID NO: 1047 - DNA, 15 bp, synthetic construct
  source 1..15: mol_type = other DNA
ttttaggactgggta

SEQ ID NO: 1048 - DNA, 15 bp, synthetic construct
  source 1..15: mol_type = other DNA
tgatgcttcaaagga

SEQ ID NO: 1049 - DNA, 15 bp, synthetic construct
  source 1..15: mol_type = other DNA
ctgtggttccagaga

SEQ ID NO: 1050 - DNA, 15 bp, synthetic construct
  source 1..15: mol_type = other DNA
ttacccagtccatcc

SEQ ID NO: 1051 - DNA, 15 bp, synthetic construct
  source 1..15: mol_type = other DNA
cttgaaggccgtgct

SEQ ID NO: 1052 - DNA, 15 bp, synthetic construct
  source 1..15: mol_type = other DNA
attgcacctcctcct

SEQ ID NO: 1053 - DNA, 15 bp, synthetic construct
  source 1..15: mol_type = other DNA
gagaccatggagcca

SEQ ID NO: 1054 - DNA, 15 bp, synthetic construct
  source 1..15: mol_type = other DNA
tcctgaatggtctgg

SEQ ID NO: 1055 - DNA, 15 bp, synthetic construct
  source 1..15: mol_type = other DNA
ctaaaagggactccc

SEQ ID NO: 1056 - DNA, 15 bp, synthetic construct
  source 1..15: mol_type = other DNA
agcatcagcttaggg

SEQ ID NO: 1057 - DNA, 15 bp, synthetic construct
  source 1..15: mol_type = other DNA
ttgaactccaccttc

SEQ ID NO: 1058 - DNA, 15 bp, synthetic construct
  source 1..15: mol_type = other DNA
ttacagacacttcct

SEQ ID NO: 1059 - DNA, 15 bp, synthetic construct
  source 1..15: mol_type = other DNA
ggtgccactatcctg

SEQ ID NO: 1060 - DNA, 15 bp, synthetic construct
  source 1..15: mol_type = other DNA
aaggcgagtgggaag

SEQ ID NO: 1061 - DNA, 15 bp, synthetic construct
  source 1..15: mol_type = other DNA
gtcccaaaggcttct

SEQ ID NO: 1062 - DNA, 15 bp, synthetic construct
  source 1..15: mol_type = other DNA
gtccctgcattcaag

SEQ ID NO: 1063 - DNA, 15 bp, synthetic construct
  source 1..15: mol_type = other DNA
gcctagcccaatgaa

SEQ ID NO: 1064 - DNA, 15 bp, synthetic construct
  source 1..15: mol_type = other DNA
tcagcttggatggac

SEQ ID NO: 1065 - DNA, 15 bp, synthetic construct
  source 1..15: mol_type = other DNA
ccttctgcagagtcg

SEQ ID NO: 1066 - DNA, 15 bp, synthetic construct
  source 1..15: mol_type = other DNA
ctgcttctcaaacag

SEQ ID NO: 1067 - DNA, 15 bp, synthetic construct
  source 1..15: mol_type = other DNA
gttcacttcctgatg

SEQ ID NO: 1068 - DNA, 15 bp, synthetic construct
  source 1..15: mol_type = other DNA
gcccacagaaatggc

SEQ ID NO: 1069 - DNA, 15 bp, synthetic construct
  source 1..15: mol_type = other DNA
ctgagacatccgctc

SEQ ID NO: 1070 - DNA, 15 bp, synthetic construct
  source 1..15: mol_type = other DNA
acagaagccatttgg

SEQ ID NO: 1071 - DNA, 15 bp, synthetic construct
  source 1..15: mol_type = other DNA
tgtacaggtcagttc

SEQ ID NO: 1072 - DNA, 15 bp, synthetic construct
  source 1..15: mol_type = other DNA
cttggactcctacat

SEQ ID NO: 1073 - DNA, 15 bp, synthetic construct
  source 1..15: mol_type = other DNA
ccctgatttcccaga

SEQ ID NO: 1074 - DNA, 15 bp, synthetic construct
  source 1..15: mol_type = other DNA
ggcaaattgtagagg

SEQ ID NO: 1075 - DNA, 15 bp, synthetic construct
  source 1..15: mol_type = other DNA
gtttctgaggtgccc

SEQ ID NO: 1076 - DNA, 15 bp, synthetic construct
  source 1..15: mol_type = other DNA
tgaactctgtgcagt

SEQ ID NO: 1077 - DNA, 15 bp, synthetic construct
  source 1..15: mol_type = other DNA
catgtaaagtctcct

SEQ ID NO: 1078 - DNA, 15 bp, synthetic construct
  source 1..15: mol_type = other DNA
tgtatatggcttcct

SEQ ID NO: 1079 - DNA, 15 bp, synthetic construct
  source 1..15: mol_type = other DNA
gcagacgaaccatag

SEQ ID NO: 1080 - DNA, 15 bp, synthetic construct
  source 1..15: mol_type = other DNA
ggcagtgtgtctctc

SEQ ID NO: 1081 - DNA, 15 bp, synthetic construct
  source 1..15: mol_type = other DNA
acaagttgggagact

SEQ ID NO: 1082 - DNA, 15 bp, synthetic construct
  source 1..15: mol_type = other DNA
tcttcaaggtgaact

SEQ ID NO: 1083 - DNA, 15 bp, synthetic construct
  source 1..15: mol_type = other DNA
aagaagccgactggg

SEQ ID NO: 1084 - DNA, 15 bp, synthetic construct
  source 1..15: mol_type = other DNA
ttgtttgtgcctgcc

SEQ ID NO: 1085 - DNA, 15 bp, synthetic construct
  source 1..15: mol_type = other DNA
cagcagcatgccttt

SEQ ID NO: 1086 - DNA, 15 bp, synthetic construct
  source 1..15: mol_type = other DNA
atcggaaggtctggt

SEQ ID NO: 1087 - DNA, 15 bp, synthetic construct
  source 1..15: mol_type = other DNA
ctttcaccgcaagga

SEQ ID NO: 1088 - DNA, 15 bp, synthetic construct
  source 1..15: mol_type = other DNA
caacatcagtcttgt

SEQ ID NO: 1089 - DNA, 15 bp, synthetic construct
  source 1..15: mol_type = other DNA
ctctctttgccatcc

SEQ ID NO: 1090 - DNA, 15 bp, synthetic construct
  source 1..15: mol_type = other DNA
tctgcatgcagtggg

SEQ ID NO: 1091 - DNA, 15 bp, synthetic construct
  source 1..15: mol_type = other DNA
ttaaccaaccctccc

SEQ ID NO: 1092 - DNA, 15 bp, synthetic construct
  source 1..15: mol_type = other DNA
ctgtgggttttctgt

SEQ ID NO: 1093 - DNA, 15 bp, synthetic construct
  source 1..15: mol_type = other DNA
cagcactgactgttt

SEQ ID NO: 1094 - DNA, 15 bp, synthetic construct
  source 1..15: mol_type = other DNA
ttccagttgttcact

SEQ ID NO: 1095 - DNA, 15 bp, synthetic construct
  source 1..15: mol_type = other DNA
gaaaattgatctcct

SEQ ID NO: 1096 - DNA, 15 bp, synthetic construct
  source 1..15: mol_type = other DNA
tttctcctgtgttgc

SEQ ID NO: 1097 - DNA, 15 bp, synthetic construct
  source 1..15: mol_type = other DNA
ctcgaatctaccggg

SEQ ID NO: 1098 - DNA, 15 bp, synthetic construct
  source 1..15: mol_type = other DNA
cagagtcaaccataa

SEQ ID NO: 1099 - DNA, 15 bp, synthetic construct
  source 1..15: mol_type = other DNA
gcccgttttggtttc

SEQ ID NO: 1100 - DNA, 15 bp, synthetic construct
  source 1..15: mol_type = other DNA
ttttaatctcctcac

SEQ ID NO: 1101 - DNA, 15 bp, synthetic construct
  source 1..15: mol_type = other DNA
agttgttgctcatgg

SEQ ID NO: 1102 - DNA, 15 bp, synthetic construct
  source 1..15: mol_type = other DNA
gtggtagagataggg

SEQ ID NO: 1103 - DNA, 15 bp, synthetic construct
  source 1..15: mol_type = other DNA
ggtcagctgtttccc

SEQ ID NO: 1104 - DNA, 15 bp, synthetic construct
  source 1..15: mol_type = other DNA
acagaaggtgacttg

SEQ ID NO: 1105 - DNA, 15 bp, synthetic construct
  source 1..15: mol_type = other DNA
ttgcccgcaaggttt

SEQ ID NO: 1106 - DNA, 15 bp, synthetic construct
  source 1..15: mol_type = other DNA
gtgttagacgttcta

SEQ ID NO: 1107 - DNA, 15 bp, synthetic construct
  source 1..15: mol_type = other DNA
ggttataaataggca

SEQ ID NO: 1108 - DNA, 15 bp, synthetic construct
  source 1..15: mol_type = other DNA
aaacaccgaagcacc

SEQ ID NO: 1109 - DNA, 15 bp, synthetic construct
  source 1..15: mol_type = other DNA
tggccaccttactca

SEQ ID NO: 1110 - DNA, 15 bp, synthetic construct
  source 1..15: mol_type = other DNA
gacactgcacgcaaa

SEQ ID NO: 1111 - DNA, 15 bp, synthetic construct
  source 1..15: mol_type = other DNA
tacatgccttggagt

SEQ ID NO: 1112 - DNA, 15 bp, synthetic construct
  source 1..15: mol_type = other DNA
gctgacccaatcatc

SEQ ID NO: 1113 - DNA, 15 bp, synthetic construct
  source 1..15: mol_type = other DNA
tgctgtattatgaag

SEQ ID NO: 1114 - DNA, 15 bp, synthetic construct
  source 1..15: mol_type = other DNA
taatgaggagtgggc

SEQ ID NO: 1115 - DNA, 15 bp, synthetic construct
  source 1..15: mol_type = other DNA
ctgcaggtagataca

SEQ ID NO: 1116 - DNA, 15 bp, synthetic construct
  source 1..15: mol_type = other DNA
tctggatgtctgcat

SEQ ID NO: 1117 - DNA, 15 bp, synthetic construct
  source 1..15: mol_type = other DNA
actgactagcaacgg

SEQ ID NO: 1118 - DNA, 15 bp, synthetic construct
  source 1..15: mol_type = other DNA
aaaggacgtgaagcc

SEQ ID NO: 1119 - DNA, 15 bp, synthetic construct
  source 1..15: mol_type = other DNA
acagagagattgaga

SEQ ID NO: 1120 - DNA, 15 bp, synthetic construct
  source 1..15: mol_type = other DNA
atgtagagaagctct

SEQ ID NO: 1121 - DNA, 15 bp, synthetic construct
  source 1..15: mol_type = other DNA
tttcctgagacttgc

SEQ ID NO: 1122 - DNA, 15 bp, synthetic construct
  source 1..15: mol_type = other DNA
cctgtgttgtttgct

SEQ ID NO: 1123 - DNA, 15 bp, synthetic construct
  source 1..15: mol_type = other DNA
tcagagctttctcca

SEQ ID NO: 1124 - DNA, 15 bp, synthetic construct
  source 1..15: mol_type = other DNA
ctgtctcagttgctg

SEQ ID NO: 1125 - DNA, 15 bp, synthetic construct
  source 1..15: mol_type = other DNA
gactgtcttcgtctg

SEQ ID NO: 1126 - DNA, 15 bp, synthetic construct
  source 1..15: mol_type = other DNA
gtccaggaactgtcc

SEQ ID NO: 1127 - DNA, 15 bp, synthetic construct
  source 1..15: mol_type = other DNA
ggtctggagtttctg

SEQ ID NO: 1128 - DNA, 15 bp, synthetic construct
  source 1..15: mol_type = other DNA
gggtgccatcacggt

SEQ ID NO: 1129 - DNA, 15 bp, synthetic construct
  source 1..15: mol_type = other DNA
aacttgtccatggtg

SEQ ID NO: 1130 - DNA, 15 bp, synthetic construct
  source 1..15: mol_type = other DNA
caccttcttgactcc

SEQ ID NO: 1131 - DNA, 15 bp, synthetic construct
  source 1..15: mol_type = other DNA
tgtttcttccgttgt

SEQ ID NO: 1132 - DNA, 15 bp, synthetic construct
  source 1..15: mol_type = other DNA
tagcacttccggatt

SEQ ID NO: 1133 - DNA, 15 bp, synthetic construct
  source 1..15: mol_type = other DNA
actatgactggagtc

SEQ ID NO: 1134 - DNA, 15 bp, synthetic construct
  source 1..15: mol_type = other DNA
gtggtgtggttgaaa

SEQ ID NO: 1135 - DNA, 15 bp, synthetic construct
  source 1..15: mol_type = other DNA
ggtgccatttctgtc

SEQ ID NO: 1136 - DNA, 15 bp, synthetic construct
  source 1..15: mol_type = other DNA
gtacaatcttcttca

SEQ ID NO: 1137 - DNA, 15 bp, synthetic construct
  source 1..15: mol_type = other DNA
acctaagacggaggg

SEQ ID NO: 1138 - DNA, 15 bp, synthetic construct
  source 1..15: mol_type = other DNA
gaagggcaaaatgga

SEQ ID NO: 1139 - DNA, 15 bp, synthetic construct
  source 1..15: mol_type = other DNA
atcttcatcatcatc

SEQ ID NO: 1140 - DNA, 15 bp, synthetic construct
  source 1..15: mol_type = other DNA
ccctcatgccatctg

SEQ ID NO: 1141 - DNA, 15 bp, synthetic construct
  source 1..15: mol_type = other DNA
atgcaaactgcaaga

SEQ ID NO: 1142 - DNA, 15 bp, synthetic construct
  source 1..15: mol_type = other DNA
atgagtggtatggga

SEQ ID NO: 1143 - DNA, 15 bp, synthetic construct
  source 1..15: mol_type = other DNA
gttggaatctccaac

SEQ ID NO: 1144 - DNA, 15 bp, synthetic construct
  source 1..15: mol_type = other DNA
aggttaatccaatcg

SEQ ID NO: 1145 - DNA, 15 bp, synthetic construct
  source 1..15: mol_type = other DNA
ggacagtggacttgt

SEQ ID NO: 1146 - DNA, 15 bp, synthetic construct
  source 1..15: mol_type = other DNA
taggtgacaaccagt

SEQ ID NO: 1147 - DNA, 15 bp, synthetic construct
  source 1..15: mol_type = other DNA
tgttttgtgcctcca

SEQ ID NO: 1148 - DNA, 15 bp, synthetic construct
  source 1..15: mol_type = other DNA
gcattgtcgcaaaca

SEQ ID NO: 1149 - DNA, 15 bp, synthetic construct
  source 1..15: mol_type = other DNA
ggctccaacaatgac

SEQ ID NO: 1150 - DNA, 15 bp, synthetic construct
  source 1..15: mol_type = other DNA
gcgaggatataggct

SEQ ID NO: 1151 - DNA, 15 bp, synthetic construct
  source 1..15: mol_type = other DNA
acacgggaacatctg

SEQ ID NO: 1152 - DNA, 15 bp, synthetic construct
  source 1..15: mol_type = other DNA
gatactcaaacctga

SEQ ID NO: 1153 - DNA, 15 bp, synthetic construct
  source 1..15: mol_type = other DNA
atcactcttatccat

SEQ ID NO: 1154 - DNA, 15 bp, synthetic construct
  source 1..15: mol_type = other DNA
cacaagtgtattcct

SEQ ID NO: 1155 - DNA, 15 bp, synthetic construct
  source 1..15: mol_type = other DNA
taatgccatactgcc

SEQ ID NO: 1156 - DNA, 15 bp, synthetic construct
  source 1..15: mol_type = other DNA
ttaaaccaaggccag

SEQ ID NO: 1157 - DNA, 15 bp, synthetic construct
  source 1..15: mol_type = other DNA
tagcaaaaattggga

SEQ ID NO: 1158 - DNA, 15 bp, synthetic construct
  source 1..15: mol_type = other DNA
agtcttctgattgga

SEQ ID NO: 1159 - DNA, 15 bp, synthetic construct
  source 1..15: mol_type = other DNA
atccaagagcgaacc

SEQ ID NO: 1160 - DNA, 15 bp, synthetic construct
  source 1..15: mol_type = other DNA
ataccaccggatcta

SEQ ID NO: 1161 - DNA, 15 bp, synthetic construct
  source 1..15: mol_type = other DNA
gtaaatatctcttcc

SEQ ID NO: 1162 - DNA, 15 bp, synthetic construct
  source 1..15: mol_type = other DNA
tttcaccttctctgg

SEQ ID NO: 1163 - DNA, 15 bp, synthetic construct
  source 1..15: mol_type = other DNA
aatcatttctccagt

SEQ ID NO: 1164 - DNA, 15 bp, synthetic construct
  source 1..15: mol_type = other DNA
atcggagtccatcac

SEQ ID NO: 1165 - DNA, 15 bp, synthetic construct
  source 1..15: mol_type = other DNA
ctgtgaacaccgcca

SEQ ID NO: 1166 - DNA, 15 bp, synthetic construct
  source 1..15: mol_type = other DNA
tgacgacagtgtcat

SEQ ID NO: 1167 - DNA, 15 bp, synthetic construct
  source 1..15: mol_type = other DNA
acattttgttgccat

SEQ ID NO: 1168 - DNA, 15 bp, synthetic construct
  source 1..15: mol_type = other DNA
tgaggtgtccatagg

SEQ ID NO: 1169 - DNA, 15 bp, synthetic construct
  source 1..15: mol_type = other DNA
tgctcgagttgctgc

SEQ ID NO: 1170 - DNA, 15 bp, synthetic construct
  source 1..15: mol_type = other DNA
gatgcattctgagcc

SEQ ID NO: 1171 - DNA, 15 bp, synthetic construct
  source 1..15: mol_type = other DNA
gagagcgagatttgg

SEQ ID NO: 1172 - DNA, 15 bp, synthetic construct
  source 1..15: mol_type = other DNA
atgaaagtctcactt

SEQ ID NO: 1173 - DNA, 15 bp, synthetic construct
  source 1..15: mol_type = other DNA
gggaggattctagga

SEQ ID NO: 1174 - DNA, 15 bp, synthetic construct
  source 1..15: mol_type = other DNA
gactagtggtggcag

SEQ ID NO: 1175 - DNA, 15 bp, synthetic construct
  source 1..15: mol_type = other DNA
cgtgctggttgggat

SEQ ID NO: 1176 - DNA, 15 bp, synthetic construct
  source 1..15: mol_type = other DNA
ccgatgatgagaggc

SEQ ID NO: 1177 - DNA, 15 bp, synthetic construct
  source 1..15: mol_type = other DNA
ggagctcaccgcagt

SEQ ID NO: 1178 - DNA, 15 bp, synthetic construct
  source 1..15: mol_type = other DNA
acagtcattccctgt

SEQ ID NO: 1179 - DNA, 15 bp, synthetic construct
  source 1..15: mol_type = other DNA
acgtgtagtctccaa

SEQ ID NO: 1180 - DNA, 15 bp, synthetic construct
  source 1..15: mol_type = other DNA
ccgccatgtagctca

SEQ ID NO: 1181 - DNA, 15 bp, synthetic construct
  source 1..15: mol_type = other DNA
atgagtggcttatgg

SEQ ID NO: 1182 - DNA, 15 bp, synthetic construct
  source 1..15: mol_type = other DNA
ggctggttgttccag

SEQ ID NO: 1183 - DNA, 15 bp, synthetic construct
  source 1..15: mol_type = other DNA
ggaaactggcagagt

SEQ ID NO: 1184 - DNA, 15 bp, synthetic construct
  source 1..15: mol_type = other DNA
aagcaataagcacca

SEQ ID NO: 1185 - DNA, 15 bp, synthetic construct
  source 1..15: mol_type = other DNA
ttactttgcccaaag

SEQ ID NO: 1186 - DNA, 15 bp, synthetic construct
  source 1..15: mol_type = other DNA
tgacgtttccatggc

SEQ ID NO: 1187 - DNA, 15 bp, synthetic construct
  source 1..15: mol_type = other DNA
cgaggaaataagggt

SEQ ID NO: 1188 - DNA, 15 bp, synthetic construct
  source 1..15: mol_type = other DNA
gggtgtcaccgtgaa

SEQ ID NO: 1189 - DNA, 15 bp, synthetic construct
  source 1..15: mol_type = other DNA
tgactcgaatctgaa

SEQ ID NO: 1190 - DNA, 15 bp, synthetic construct
  source 1..15: mol_type = other DNA
tgatgcccttgtctg

SEQ ID NO: 1191 - DNA, 15 bp, synthetic construct
  source 1..15: mol_type = other DNA
aaaagtgtcccagtg

SEQ ID NO: 1192 - DNA, 15 bp, synthetic construct
  source 1..15: mol_type = other DNA
ttctgccactatttt

SEQ ID NO: 1193 - DNA, 15 bp, synthetic construct
  source 1..15: mol_type = other DNA
gtgtcctcccagaat

SEQ ID NO: 1194 - DNA, 15 bp, synthetic construct
  source 1..15: mol_type = other DNA
acgagctgagttaat

SEQ ID NO: 1195 - DNA, 15 bp, synthetic construct
  source 1..15: mol_type = other DNA
ccttctcttgtcctg

SEQ ID NO: 1196 - DNA, 15 bp, synthetic construct
  source 1..15: mol_type = other DNA
cttcaacctgtcagg

SEQ ID NO: 1197 - DNA, 15 bp, synthetic construct
  source 1..15: mol_type = other DNA
aagctgagacgcagc

SEQ ID NO: 1198 - DNA, 15 bp, synthetic construct
  source 1..15: mol_type = other DNA
cagctcagctacgtc

SEQ ID NO: 1199 - DNA, 15 bp, synthetic construct
  source 1..15: mol_type = other DNA
cttgactttgagtcc

SEQ ID NO: 1200 - DNA, 15 bp, synthetic construct
  source 1..15: mol_type = other DNA
atctttaggagccaa

SEQ ID NO: 1201 - DNA, 15 bp, synthetic construct
  source 1..15: mol_type = other DNA
ttggacagatgactc

SEQ ID NO: 1202 - DNA, 15 bp, synthetic construct
  source 1..15: mol_type = other DNA
cgcgaccaatgggac

SEQ ID NO: 1203 - DNA, 15 bp, synthetic construct
  source 1..15: mol_type = other DNA
tgccatcacgatgga

SEQ ID NO: 1204 - DNA, 15 bp, synthetic construct
  source 1..15: mol_type = other DNA
agctacaaaggctgg

SEQ ID NO: 1205 - DNA, 15 bp, synthetic construct
  source 1..15: mol_type = other DNA
ttggtggcattctgc

SEQ ID NO: 1206 - DNA, 15 bp, synthetic construct
  source 1..15: mol_type = other DNA
gtgtacagggctccg

SEQ ID NO: 1207 - DNA, 15 bp, synthetic construct
  source 1..15: mol_type = other DNA
ggtcgcgctggtcat

SEQ ID NO: 1208 - DNA, 15 bp, synthetic construct
  source 1..15: mol_type = other DNA
gtgggcttttgctcc

SEQ ID NO: 1209 - DNA, 15 bp, synthetic construct
  source 1..15: mol_type = other DNA
gtgtctcaggttctc

SEQ ID NO: 1210 - DNA, 15 bp, synthetic construct
  source 1..15: mol_type = other DNA
cacattgaaggtact

SEQ ID NO: 1211 - DNA, 15 bp, synthetic construct
  source 1..15: mol_type = other DNA
tcgttgccctcctgg

SEQ ID NO: 1212 - DNA, 15 bp, synthetic construct
  source 1..15: mol_type = other DNA
ccctgacagatcagg

SEQ ID NO: 1213 - DNA, 15 bp, synthetic construct
  source 1..15: mol_type = other DNA
ggtagtatggctcag

SEQ ID NO: 1214 - DNA, 15 bp, synthetic construct
  source 1..15: mol_type = other DNA
gagcagtcgtccagg

SEQ ID NO: 1215 - DNA, 15 bp, synthetic construct
  source 1..15: mol_type = other DNA
atgatcagcgtacca

SEQ ID NO: 1216 - DNA, 15 bp, synthetic construct
  source 1..15: mol_type = other DNA
ggccacgtgtagttg

SEQ ID NO: 1217 - DNA, 15 bp, synthetic construct
  source 1..15: mol_type = other DNA
attgtgcgggcattg

SEQ ID NO: 1218 - DNA, 15 bp, synthetic construct
  source 1..15: mol_type = other DNA
ggctgctacaatcag

SEQ ID NO: 1219 - DNA, 15 bp, synthetic construct
  source 1..15: mol_type = other DNA
accttgtgcatccac

SEQ ID NO: 1220 - DNA, 15 bp, synthetic construct
  source 1..15: mol_type = other DNA
agggctcattacccg

SEQ ID NO: 1221 - DNA, 15 bp, synthetic construct
  source 1..15: mol_type = other DNA
cggcatccaacccga

SEQ ID NO: 1222 - DNA, 15 bp, synthetic construct
  source 1..15: mol_type = other DNA
ccagggaagtgagct

SEQ ID NO: 1223 - DNA, 15 bp, synthetic construct
  source 1..15: mol_type = other DNA
aggacagcgttgcca

SEQ ID NO: 1224 - DNA, 15 bp, synthetic construct
  source 1..15: mol_type = other DNA
gtcagatgggcgcag

SEQ ID NO: 1225 - DNA, 15 bp, synthetic construct
  source 1..15: mol_type = other DNA
aggttgagcaaatta

SEQ ID NO: 1226 - DNA, 15 bp, synthetic construct
  source 1..15: mol_type = other DNA
ctttcccttctcaat

SEQ ID NO: 1227 - DNA, 15 bp, synthetic construct
  source 1..15: mol_type = other DNA
ttgccagtagatgcg

SEQ ID NO: 1228 - DNA, 15 bp, synthetic construct
  source 1..15: mol_type = other DNA
aaaatgctcttgctt

SEQ ID NO: 1229 - DNA, 15 bp, synthetic construct
  source 1..15: mol_type = other DNA
gaggtatggacactt

SEQ ID NO: 1230 - DNA, 15 bp, synthetic construct
  source 1..15: mol_type = other DNA
tacgtaaagggcaag

SEQ ID NO: 1231 - DNA, 15 bp, synthetic construct
  source 1..15: mol_type = other DNA
cgtagaagaccctcc

SEQ ID NO: 1232 - DNA, 15 bp, synthetic construct
  source 1..15: mol_type = other DNA
cttctaacttctgtt

SEQ ID NO: 1233 - DNA, 15 bp, synthetic construct
  source 1..15: mol_type = other DNA
agaggttattagtga

SEQ ID NO: 1234 - DNA, 15 bp, synthetic construct
  source 1..15: mol_type = other DNA
ttcgggtcacctccc

SEQ ID NO: 1235 - DNA, 15 bp, synthetic construct
  source 1..15: mol_type = other DNA
gaaagcgtctttttc

SEQ ID NO: 1236 - DNA, 15 bp, synthetic construct
  source 1..15: mol_type = other DNA
agcatagagctcagt

SEQ ID NO: 1237 - DNA, 15 bp, synthetic construct
  source 1..15: mol_type = other DNA
gacccaagtaagacc

SEQ ID NO: 1238 - DNA, 15 bp, synthetic construct
  source 1..15: mol_type = other DNA
aaagagcaccagagt

SEQ ID NO: 1239 - DNA, 15 bp, synthetic construct
  source 1..15: mol_type = other DNA
agactccacttctga

SEQ ID NO: 1240 - DNA, 15 bp, synthetic construct
  source 1..15: mol_type = other DNA
gaagctgtggttggt

SEQ ID NO: 1241 - DNA, 15 bp, synthetic construct
  source 1..15: mol_type = other DNA
caaccaggagaggtg

SEQ ID NO: 1242 - DNA, 15 bp, synthetic construct
  source 1..15: mol_type = other DNA
ctgaggaagttccca

SEQ ID NO: 1243 - DNA, 15 bp, synthetic construct
  source 1..15: mol_type = other DNA
cgggccatatattca

SEQ ID NO: 1244 - DNA, 15 bp, synthetic construct
  source 1..15: mol_type = other DNA
ttaaggtaatggccc

SEQ ID NO: 1245 - DNA, 15 bp, synthetic construct
  source 1..15: mol_type = other DNA
atttagtttcacagc

SEQ ID NO: 1246 - DNA, 15 bp, synthetic construct
  source 1..15: mol_type = other DNA
gcagttggctatgtc

SEQ ID NO: 1247 - DNA, 15 bp, synthetic construct
  source 1..15: mol_type = other DNA
gcaaggtggtaagaa

SEQ ID NO: 1248 - DNA, 15 bp, synthetic construct
  source 1..15: mol_type = other DNA
ccaaaaagagaccag

SEQ ID NO: 1249 - DNA, 15 bp, synthetic construct
  source 1..15: mol_type = other DNA
tccagaatacagaag

SEQ ID NO: 1250 - DNA, 15 bp, synthetic construct
  source 1..15: mol_type = other DNA
aggccgcttcttctt

SEQ ID NO: 1251 - DNA, 15 bp, synthetic construct
  source 1..15: mol_type = other DNA
gcggcccatatactt

SEQ ID NO: 1252 - DNA, 15 bp, synthetic construct
  source 1..15: mol_type = other DNA
accctgtgcaagcct

SEQ ID NO: 1253 - DNA, 15 bp, synthetic construct
  source 1..15: mol_type = other DNA
ttgtagagagagaaa

SEQ ID NO: 1254 - DNA, 15 bp, synthetic construct
  source 1..15: mol_type = other DNA
ttctctccactatgg

SEQ ID NO: 1255 - DNA, 15 bp, synthetic construct
  source 1..15: mol_type = other DNA
taatccaaggaatgt

SEQ ID NO: 1256 - DNA, 15 bp, synthetic construct
  source 1..15: mol_type = other DNA
cactcatccgtgtgt

SEQ ID NO: 1257 - DNA, 15 bp, synthetic construct
  source 1..15: mol_type = other DNA
atgaaacagacaagc

SEQ ID NO: 1258 - DNA, 15 bp, synthetic construct
  source 1..15: mol_type = other DNA
gaaaagaagcagtaa

SEQ ID NO: 1259 - DNA, 15 bp, synthetic construct
  source 1..15: mol_type = other DNA
cgtgtatagatgagc

SEQ ID NO: 1260 - DNA, 15 bp, synthetic construct
  source 1..15: mol_type = other DNA
ccgtacctcctaagg

SEQ ID NO: 1261 - DNA, 15 bp, synthetic construct
  source 1..15: mol_type = other DNA
tgtgaagtctcaggg

SEQ ID NO: 1262 - DNA, 15 bp, synthetic construct
  source 1..15: mol_type = other DNA
tgacggtagaactca

SEQ ID NO: 1263 - DNA, 15 bp, synthetic construct
  source 1..15: mol_type = other DNA
gtgatggatgataca

SEQ ID NO: 1264 - DNA, 15 bp, synthetic construct
  source 1..15: mol_type = other DNA
aattggcatggcagg

SEQ ID NO: 1265 - DNA, 15 bp, synthetic construct
  source 1..15: mol_type = other DNA
agaactcaaatacag

SEQ ID NO: 1266 - DNA, 15 bp, synthetic construct
  source 1..15: mol_type = other DNA
acagggttcacaagc

SEQ ID NO: 1267 - DNA, 15 bp, synthetic construct
  source 1..15: mol_type = other DNA
ctagctcactcaggc

SEQ ID NO: 1268 - DNA, 15 bp, synthetic construct
  source 1..15: mol_type = other DNA
gttactcagtcccat

SEQ ID NO: 1269 - DNA, 15 bp, synthetic construct
  source 1..15: mol_type = other DNA
tggtggatgcgaatc

SEQ ID NO: 1270 - DNA, 15 bp, synthetic construct
  source 1..15: mol_type = other DNA
caggtgctaggagtc

SEQ ID NO: 1271 - DNA, 15 bp, synthetic construct
  source 1..15: mol_type = other DNA
gcttcatcgccggct

SEQ ID NO: 1272 - DNA, 15 bp, synthetic construct
  source 1..15: mol_type = other DNA
taggagctatgtgaa

SEQ ID NO: 1273 - DNA, 15 bp, synthetic construct
  source 1..15: mol_type = other DNA
ctgagaactctgcgg

SEQ ID NO: 1274 - DNA, 15 bp, synthetic construct
  source 1..15: mol_type = other DNA
ggaacacgtgatgcc

SEQ ID NO: 1275 - DNA, 15 bp, synthetic construct
  source 1..15: mol_type = other DNA
atccatccaccttgg

SEQ ID NO: 1276 - DNA, 15 bp, synthetic construct
  source 1..15: mol_type = other DNA
agaggtataggagga

SEQ ID NO: 1277 - DNA, 15 bp, synthetic construct
  source 1..15: mol_type = other DNA
catgtttgggacagc

SEQ ID NO: 1278 - DNA, 15 bp, synthetic construct
  source 1..15: mol_type = other DNA
ctcactgatgctcaa

SEQ ID NO: 1279 - DNA, 15 bp, synthetic construct
  source 1..15: mol_type = other DNA
ggaagtcgctcaggg

SEQ ID NO: 1280 - DNA, 15 bp, synthetic construct
  source 1..15: mol_type = other DNA
gtggctgaagtacat

SEQ ID NO: 1281 - DNA, 15 bp, synthetic construct
  source 1..15: mol_type = other DNA
ttgccgttggagact

SEQ ID NO: 1282 - DNA, 15 bp, synthetic construct
  source 1..15: mol_type = other DNA
acctgaatggtgtgg

SEQ ID NO: 1283 - DNA, 15 bp, synthetic construct
  source 1..15: mol_type = other DNA
atatcacaggcgaag

SEQ ID NO: 1284 - DNA, 15 bp, synthetic construct
  source 1..15: mol_type = other DNA
cccaacctcttgccc

SEQ ID NO: 1285 - DNA, 15 bp, synthetic construct
  source 1..15: mol_type = other DNA
accgcgatgtgcgca

SEQ ID NO: 1286 - DNA, 15 bp, synthetic construct
  source 1..15: mol_type = other DNA
aaggatctcagtttg

SEQ ID NO: 1287 - DNA, 15 bp, synthetic construct
  source 1..15: mol_type = other DNA
tgtgatgtcacccga

SEQ ID NO: 1288 - DNA, 15 bp, synthetic construct
  source 1..15: mol_type = other DNA
ttgtcgccttccagc

SEQ ID NO: 1289 - DNA, 15 bp, synthetic construct
  source 1..15: mol_type = other DNA
ccgatttgaccacag

SEQ ID NO: 1290 - DNA, 15 bp, synthetic construct
  source 1..15: mol_type = other DNA
tcccaggaacatgtt

SEQ ID NO: 1291 - DNA, 15 bp, synthetic construct
  source 1..15: mol_type = other DNA
ggcccagcgcattta

SEQ ID NO: 1292 - DNA, 15 bp, synthetic construct
  source 1..15: mol_type = other DNA
aaccagtgacaggag

SEQ ID NO: 1293 - DNA, 15 bp, synthetic construct
  source 1..15: mol_type = other DNA
ctgtagattttacct

SEQ ID NO: 1294 - DNA, 15 bp, synthetic construct
  source 1..15: mol_type = other DNA
gggttaagctcacca

SEQ ID NO: 1295 - DNA, 15 bp, synthetic construct
  source 1..15: mol_type = other DNA
ctgtgagggtggatt

SEQ ID NO: 1296 - DNA, 15 bp, synthetic construct
  source 1..15: mol_type = other DNA
cttcaatagtgagct

SEQ ID NO: 1297 - DNA, 15 bp, synthetic construct
  source 1..15: mol_type = other DNA
tgagtctaggagtct

SEQ ID NO: 1298 - DNA, 15 bp, synthetic construct
  source 1..15: mol_type = other DNA
tggtgacgttccgca

SEQ ID NO: 1299 - DNA, 15 bp, synthetic construct
  source 1..15: mol_type = other DNA
cgggatacaggtctc

SEQ ID NO: 1300 - DNA, 15 bp, synthetic construct
  source 1..15: mol_type = other DNA
cttcttgaaatgcag

SEQ ID NO: 1301 - DNA, 15 bp, synthetic construct
  source 1..15: mol_type = other DNA
actacaccagagcta

SEQ ID NO: 1302 - DNA, 15 bp, synthetic construct
  source 1..15: mol_type = other DNA
actgtcagccattgg

SEQ ID NO: 1303 - DNA, 15 bp, synthetic construct
  source 1..15: mol_type = other DNA
gctggaatgtgccat

SEQ ID NO: 1304 - DNA, 15 bp, synthetic construct
  source 1..15: mol_type = other DNA
ccgctgttctttgta

SEQ ID NO: 1305 - DNA, 15 bp, synthetic construct
  source 1..15: mol_type = other DNA
cagttacttcttcac

SEQ ID NO: 1306 - DNA, 15 bp, synthetic construct
  source 1..15: mol_type = other DNA
cccagttctgtggca

SEQ ID NO: 1307 - DNA, 15 bp, synthetic construct
  source 1..15: mol_type = other DNA
atagggtcctacgtc

SEQ ID NO: 1308 - DNA, 15 bp, synthetic construct
  source 1..15: mol_type = other DNA
aaagttatcaggaac

SEQ ID NO: 1309 - DNA, 15 bp, synthetic construct
  source 1..15: mol_type = other DNA
ttggcatccactgtt

SEQ ID NO: 1310 - DNA, 15 bp, synthetic construct
  source 1..15: mol_type = other DNA
aacttcacaaaggta

SEQ ID NO: 1311 - DNA, 15 bp, synthetic construct
  source 1..15: mol_type = other DNA
gcgcgtagtatcggc

SEQ ID NO: 1312 - DNA, 15 bp, synthetic construct
  source 1..15: mol_type = other DNA
tctcatgcttgccca

SEQ ID NO: 1313 - DNA, 15 bp, synthetic construct
  source 1..15: mol_type = other DNA
tcatagtccttagac

SEQ ID NO: 1314 - DNA, 15 bp, synthetic construct
  source 1..15: mol_type = other DNA
cagcttcactccgtc

SEQ ID NO: 1315 - DNA, 15 bp, synthetic construct
  source 1..15: mol_type = other DNA
ggctgttggagaagg

SEQ ID NO: 1316 - DNA, 15 bp, synthetic construct
  source 1..15: mol_type = other DNA
tgaacacttcgtagg

SEQ ID NO: 1317 - DNA, 15 bp, synthetic construct
  source 1..15: mol_type = other DNA
gccagacggcgaaca

SEQ ID NO: 1318 - DNA, 15 bp, synthetic construct
  source 1..15: mol_type = other DNA
ggcatgaggtcgtcg

SEQ ID NO: 1319 - DNA, 15 bp, synthetic construct
  source 1..15: mol_type = other DNA
tcttagccatcaaaa

SEQ ID NO: 1320 - DNA, 15 bp, synthetic construct
  source 1..15: mol_type = other DNA
ggtgacggaagtctc

SEQ ID NO: 1321 - DNA, 15 bp, synthetic construct
  source 1..15: mol_type = other DNA
ctttgacaagcgtca

SEQ ID NO: 1322 - DNA, 15 bp, synthetic construct
  source 1..15: mol_type = other DNA
gtcattgagcacagc

SEQ ID NO: 1323 - DNA, 15 bp, synthetic construct
  source 1..15: mol_type = other DNA
aggctcgcgtggtca

SEQ ID NO: 1324 - DNA, 15 bp, synthetic construct
  source 1..15: mol_type = other DNA
agaacgctttggtgg

SEQ ID NO: 1325 - DNA, 15 bp, synthetic construct
  source 1..15: mol_type = other DNA
acagtgaggctcctg

SEQ ID NO: 1326 - DNA, 15 bp, synthetic construct
  source 1..15: mol_type = other DNA
gtttcgacattactg

SEQ ID NO: 1327 - DNA, 15 bp, synthetic construct
  source 1..15: mol_type = other DNA
ccaaagaagcccagg

SEQ ID NO: 1328 - DNA, 15 bp, synthetic construct
  source 1..15: mol_type = other DNA
agatcctctctgatc

SEQ ID NO: 1329 - DNA, 15 bp, synthetic construct
  source 1..15: mol_type = other DNA
gagcctccgactttg

SEQ ID NO: 1330 - DNA, 15 bp, synthetic construct
  source 1..15: mol_type = other DNA
gcgcagttcatccac

SEQ ID NO: 1331 - DNA, 15 bp, synthetic construct
  source 1..15: mol_type = other DNA
tcctctacatgcctg

SEQ ID NO: 1332 - DNA, 15 bp, synthetic construct
  source 1..15: mol_type = other DNA
tttcatgatgtacag

SEQ ID NO: 1333 - DNA, 15 bp, synthetic construct
  source 1..15: mol_type = other DNA
aacaggttctggaag

SEQ ID NO: 1334 - DNA, 15 bp, synthetic construct
  source 1..15: mol_type = other DNA
ttgcccttgtgggca

SEQ ID NO: 1335 - DNA, 15 bp, synthetic construct
  source 1..15: mol_type = other DNA
ttcacccacgttgtg

SEQ ID NO: 1336 - DNA, 15 bp, synthetic construct
  source 1..15: mol_type = other DNA
gaaaccaaaatttgc

SEQ ID NO: 1337 - DNA, 15 bp, synthetic construct
  source 1..15: mol_type = other DNA
tcctcagtcaaccat

SEQ ID NO: 1338 - DNA, 15 bp, synthetic construct
  source 1..15: mol_type = other DNA
ttcatgctcggatgg

SEQ ID NO: 1339 - DNA, 15 bp, synthetic construct
  source 1..15: mol_type = other DNA
caaagacttctatct

SEQ ID NO: 1340 - DNA, 15 bp, synthetic construct
  source 1..15: mol_type = other DNA
tgtccgagaagacat

SEQ ID NO: 1341 - DNA, 15 bp, synthetic construct
  source 1..15: mol_type = other DNA
gcggctcctaattca

SEQ ID NO: 1342 - DNA, 15 bp, synthetic construct
  source 1..15: mol_type = other DNA
tgagtgaggcacgta

SEQ ID NO: 1343 - DNA, 15 bp, synthetic construct
  source 1..15: mol_type = other DNA
attctcagattgccc

SEQ ID NO: 1344 - DNA, 15 bp, synthetic construct
  source 1..15: mol_type = other DNA
caaaccctccgacac

SEQ ID NO: 1345 - DNA, 15 bp, synthetic construct
  source 1..15: mol_type = other DNA
aaggtgctttgatag

SEQ ID NO: 1346 - DNA, 15 bp, synthetic construct
  source 1..15: mol_type = other DNA
caaagccagcgtccg

SEQ ID NO: 1347 - DNA, 15 bp, synthetic construct
  source 1..15: mol_type = other DNA
tgcgagttatttgag

SEQ ID NO: 1348 - DNA, 15 bp, synthetic construct
  source 1..15: mol_type = other DNA
tgctgcagttagacg

SEQ ID NO: 1349 - DNA, 15 bp, synthetic construct
  source 1..15: mol_type = other DNA
cgtggaaccttcctt

SEQ ID NO: 1350 - DNA, 15 bp, synthetic construct
  source 1..15: mol_type = other DNA
tgttttcttcaggac

SEQ ID NO: 1351 - DNA, 15 bp, synthetic construct
  source 1..15: mol_type = other DNA
atctttaccattgtg

SEQ ID NO: 1352 - DNA, 15 bp, synthetic construct
  source 1..15: mol_type = other DNA
tgccctctcttgttg

SEQ ID NO: 1353 - DNA, 15 bp, synthetic construct
  source 1..15: mol_type = other DNA
tgcatcgcaatggtg

SEQ ID NO: 1354 - DNA, 15 bp, synthetic construct
  source 1..15: mol_type = other DNA
gggagacattggagc

SEQ ID NO: 1355 - DNA, 15 bp, synthetic construct
  source 1..15: mol_type = other DNA
ggttagctgactggg

SEQ ID NO: 1356 - DNA, 15 bp, synthetic construct
  source 1..15: mol_type = other DNA
aggatctcaacgcat

SEQ ID NO: 1357 - DNA, 15 bp, synthetic construct
  source 1..15: mol_type = other DNA
ggtaagtgtctggtg

SEQ ID NO: 1358 - DNA, 15 bp, synthetic construct
  source 1..15: mol_type = other DNA
cagaaaagcatttca

SEQ ID NO: 1359 - DNA, 15 bp, synthetic construct
  source 1..15: mol_type = other DNA
cagtcattccgggct

SEQ ID NO: 1360 - DNA, 15 bp, synthetic construct
  source 1..15: mol_type = other DNA
tattcccaagtgtat

SEQ ID NO: 1361 - DNA, 15 bp, synthetic construct
  source 1..15: mol_type = other DNA
tagtgatagcattcc

SEQ ID NO: 1362 - DNA, 15 bp, synthetic construct
  source 1..15: mol_type = other DNA
ccaaatgctccaaat

SEQ ID NO: 1363 - DNA, 15 bp, synthetic construct
  source 1..15: mol_type = other DNA
caagacagcatgctc

SEQ ID NO: 1364 - DNA, 15 bp, synthetic construct
  source 1..15: mol_type = other DNA
cccaaaaacatagat

SEQ ID NO: 1365 - DNA, 15 bp, synthetic construct
  source 1..15: mol_type = other DNA
aagagaggtgtatat

SEQ ID NO: 1366 - DNA, 15 bp, synthetic construct
  source 1..15: mol_type = other DNA
tggatgctgttaata

SEQ ID NO: 1367 - DNA, 15 bp, synthetic construct
  source 1..15: mol_type = other DNA
ggactgctgttatgg

SEQ ID NO: 1368 - DNA, 15 bp, synthetic construct
  source 1..15: mol_type = other DNA
atgaaggcttggcaa

SEQ ID NO: 1369 - DNA, 15 bp, synthetic construct
  source 1..15: mol_type = other DNA
atcttcgcagaggat

SEQ ID NO: 1370 - DNA, 15 bp, synthetic construct
  source 1..15: mol_type = other DNA
tagggttcttcctgg

SEQ ID NO: 1371 - DNA, 15 bp, synthetic construct
  source 1..15: mol_type = other DNA
tcaaagagcttcacg

SEQ ID NO: 1372 - DNA, 15 bp, synthetic construct
  source 1..15: mol_type = other DNA
acttactcacggacc

SEQ ID NO: 1373 - DNA, 15 bp, synthetic construct
  source 1..15: mol_type = other DNA
aaggatgagtcctct

SEQ ID NO: 1374 - DNA, 15 bp, synthetic construct
  source 1..15: mol_type = other DNA
ttccctgattggaca

SEQ ID NO: 1375 - DNA, 15 bp, synthetic construct
  source 1..15: mol_type = other DNA
tcaacctctcagcga

SEQ ID NO: 1376 - DNA, 15 bp, synthetic construct
  source 1..15: mol_type = other DNA
taggactttagcagc

SEQ ID NO: 1377 - DNA, 15 bp, synthetic construct
  source 1..15: mol_type = other DNA
ccgagtcagaagtgt

SEQ ID NO: 1378 - DNA, 15 bp, synthetic construct
  source 1..15: mol_type = other DNA
aagaaccctggcatc

SEQ ID NO: 1379 - DNA, 15 bp, synthetic construct
  source 1..15: mol_type = other DNA
atctcaaggaagggc

SEQ ID NO: 1380 - DNA, 15 bp, synthetic construct
  source 1..15: mol_type = other DNA
aaccaacaggacgat

SEQ ID NO: 1381 - DNA, 15 bp, synthetic construct
  source 1..15: mol_type = other DNA
gagcagtgtcttgcg

SEQ ID NO: 1382 - DNA, 15 bp, synthetic construct
  source 1..15: mol_type = other DNA
ctggaaggtcaagag

SEQ ID NO: 1383 - DNA, 15 bp, synthetic construct
  source 1..15: mol_type = other DNA
ctgctcgttcagctg

SEQ ID NO: 1384 - DNA, 15 bp, synthetic construct
  source 1..15: mol_type = other DNA
ctgcagcgctttctc

SEQ ID NO: 1385 - DNA, 15 bp, synthetic construct
  source 1..15: mol_type = other DNA
tggtccttcatccgc

SEQ ID NO: 1386 - DNA, 15 bp, synthetic construct
  source 1..15: mol_type = other DNA
tgcatccctagtggg

SEQ ID NO: 1387 - DNA, 15 bp, synthetic construct
  source 1..15: mol_type = other DNA
cgatcatgtcagaca

SEQ ID NO: 1388 - DNA, 15 bp, synthetic construct
  source 1..15: mol_type = other DNA
tgcatgcaagccgaa

SEQ ID NO: 1389 - DNA, 15 bp, synthetic construct
  source 1..15: mol_type = other DNA
cttcgccttgcgtga

SEQ ID NO: 1390 - DNA, 15 bp, synthetic construct
  source 1..15: mol_type = other DNA
gtaatcaggcgcaaa

SEQ ID NO: 1391 - DNA, 15 bp, synthetic construct
  source 1..15: mol_type = other DNA
gggctcgtacggaga

SEQ ID NO: 1392 - DNA, 15 bp, synthetic construct
  source 1..15: mol_type = other DNA
cccgttgacagcatt

SEQ ID NO: 1393 - DNA, 15 bp, synthetic construct
  source 1..15: mol_type = other DNA
tggcatcatcagccc

SEQ ID NO: 1394 - DNA, 15 bp, synthetic construct
  source 1..15: mol_type = other DNA
tcgccctgttcgcct

SEQ ID NO: 1395 - DNA, 15 bp, synthetic construct
  source 1..15: mol_type = other DNA
tcacagatcacgtca

SEQ ID NO: 1396 - DNA, 15 bp, synthetic construct
  source 1..15: mol_type = other DNA
cttggatttttcact

SEQ ID NO: 1397 - DNA, 15 bp, synthetic construct
  source 1..15: mol_type = other DNA
caccaggttggccgt

SEQ ID NO: 1398 - DNA, 15 bp, synthetic construct
  source 1..15: mol_type = other DNA
atgctctcgccgaac

SEQ ID NO: 1399 - DNA, 15 bp, synthetic construct
  source 1..15: mol_type = other DNA
cggacgccatctttg

SEQ ID NO: 1400 - DNA, 15 bp, synthetic construct
  source 1..15: mol_type = other DNA
tgttcggttggtcaa

SEQ ID NO: 1401 - DNA, 15 bp, synthetic construct
  source 1..15: mol_type = other DNA
tctagaccctagaca

SEQ ID NO: 1402 - DNA, 15 bp, synthetic construct
  source 1..15: mol_type = other DNA
tgtacgcaggtgatt

SEQ ID NO: 1403 - DNA, 15 bp, synthetic construct
  source 1..15: mol_type = other DNA
tttgatggcatccag

SEQ ID NO: 1404 - DNA, 15 bp, synthetic construct
  source 1..15: mol_type = other DNA
cccgcatgggtcttc

SEQ ID NO: 1405 - DNA, 15 bp, synthetic construct
  source 1..15: mol_type = other DNA
tgtaggtgaagcggc

SEQ ID NO: 1406 - DNA, 15 bp, synthetic construct
  source 1..15: mol_type = other DNA
ccttctcttgaggtg

SEQ ID NO: 1407 - DNA, 15 bp, synthetic construct
  source 1..15: mol_type = other DNA
tgctttattccagca

SEQ ID NO: 1408 - DNA, 15 bp, synthetic construct
  source 1..15: mol_type = other DNA
tgcttgtctgtttcc

SEQ ID NO: 1409 - DNA, 15 bp, synthetic construct
  source 1..15: mol_type = other DNA
cataagacagctggg

SEQ ID NO: 1410 - DNA, 15 bp, synthetic construct
  source 1..15: mol_type = other DNA
cagttcttctgggcc

SEQ ID NO: 1411 - DNA, 15 bp, synthetic construct
  source 1..15: mol_type = other DNA
ttcagcaacacagtt

SEQ ID NO: 1412 - DNA, 15 bp, synthetic construct
  source 1..15: mol_type = other DNA
cgttgtcgcagacgc

SEQ ID NO: 1413 - DNA, 15 bp, synthetic construct
  source 1..15: mol_type = other DNA
agtccatctttgcca

SEQ ID NO: 1414 - DNA, 15 bp, synthetic construct
  source 1..15: mol_type = other DNA
cagggaatcccatca

SEQ ID NO: 1415 - DNA, 15 bp, synthetic construct
  source 1..15: mol_type = other DNA
aaagctcgcctgctc

SEQ ID NO: 1416 - DNA, 15 bp, synthetic construct
  source 1..15: mol_type = other DNA
ctgctttgtcgtggc

SEQ ID NO: 1417 - DNA, 15 bp, synthetic construct
  source 1..15: mol_type = other DNA
tcagggtagatggcc

SEQ ID NO: 1418 - DNA, 15 bp, synthetic construct
  source 1..15: mol_type = other DNA
gtatactgctctcct

SEQ ID NO: 1419 - DNA, 15 bp, synthetic construct
  source 1..15: mol_type = other DNA
tccttctgggattga

SEQ ID NO: 1420 - DNA, 15 bp, synthetic construct
  source 1..15: mol_type = other DNA
ttgtgaaggaggcat

SEQ ID NO: 1421 - DNA, 15 bp, synthetic construct
  source 1..15: mol_type = other DNA
catggtcagaggcat

SEQ ID NO: 1422 - DNA, 15 bp, synthetic construct
  source 1..15: mol_type = other DNA
gcggcaatgtagtag

SEQ ID NO: 1423 - DNA, 15 bp, synthetic construct
  source 1..15: mol_type = other DNA
cccaatcggctcaat

SEQ ID NO: 1424 - DNA, 15 bp, synthetic construct
  source 1..15: mol_type = other DNA
ttggtcattaggcct

SEQ ID NO: 1425 - DNA, 15 bp, synthetic construct
  source 1..15: mol_type = other DNA
gaaagctgcgtgcac

SEQ ID NO: 1426 - DNA, 15 bp, synthetic construct
  source 1..15: mol_type = other DNA
agtcttcgttgtctt

SEQ ID NO: 1427 - DNA, 15 bp, synthetic construct
  source 1..15: mol_type = other DNA
atgaaaggtgtaggg

SEQ ID NO: 1428 - DNA, 15 bp, synthetic construct
  source 1..15: mol_type = other DNA
aattctatctgggcc

SEQ ID NO: 1429 - DNA, 15 bp, synthetic construct
  source 1..15: mol_type = other DNA
ctccactggaacacg

SEQ ID NO: 1430 - DNA, 15 bp, synthetic construct
  source 1..15: mol_type = other DNA
aaaacatcaccacaa

SEQ ID NO: 1431 - DNA, 15 bp, synthetic construct
  source 1..15: mol_type = other DNA
tttagtgggttccac

SEQ ID NO: 1432 - DNA, 15 bp, synthetic construct
  source 1..15: mol_type = other DNA
cttcagcacacatgg

SEQ ID NO: 1433 - DNA, 15 bp, synthetic construct
  source 1..15: mol_type = other DNA
acggtgtaagtggtt

SEQ ID NO: 1434 - DNA, 15 bp, synthetic construct
  source 1..15: mol_type = other DNA
ctgacagctgagcat

SEQ ID NO: 1435 - DNA, 15 bp, synthetic construct
  source 1..15: mol_type = other DNA
agatcacattccata

SEQ ID NO: 1436 - DNA, 15 bp, synthetic construct
  source 1..15: mol_type = other DNA
taagtaccacacgac

SEQ ID NO: 1437 - DNA, 15 bp, synthetic construct
  source 1..15: mol_type = other DNA
aggttgattgtgtca

SEQ ID NO: 1438 - DNA, 15 bp, synthetic construct
  source 1..15: mol_type = other DNA
atgaatccattcatg

SEQ ID NO: 1439 - DNA, 15 bp, synthetic construct
  source 1..15: mol_type = other DNA
ggcctaaaaacccaa

SEQ ID NO: 1440 - DNA, 15 bp, synthetic construct
  source 1..15: mol_type = other DNA
gataccagttgactt

SEQ ID NO: 1441 - DNA, 15 bp, synthetic construct
  source 1..15: mol_type = other DNA
caaggtcaccgttgc

SEQ ID NO: 1442 - DNA, 15 bp, synthetic construct
  source 1..15: mol_type = other DNA
tggttgtgctctaag

SEQ ID NO: 1443 - DNA, 15 bp, synthetic construct
  source 1..15: mol_type = other DNA
acgatgttctcgtgc

SEQ ID NO: 1444 - DNA, 15 bp, synthetic construct
  source 1..15: mol_type = other DNA
tcatgatgtccctag

SEQ ID NO: 1445 - DNA, 15 bp, synthetic construct
  source 1..15: mol_type = other DNA
acgtcagagctctcc

SEQ ID NO: 1446 - DNA, 15 bp, synthetic construct
  source 1..15: mol_type = other DNA
aaaaccttgcaggcc

SEQ ID NO: 1447 - DNA, 15 bp, synthetic construct
  source 1..15: mol_type = other DNA
gatcgaggttgaggg

SEQ ID NO: 1448 - DNA, 15 bp, synthetic construct
  source 1..15: mol_type = other DNA
atttgaagaagtgga

SEQ ID NO: 1449 - DNA, 15 bp, synthetic construct
  source 1..15: mol_type = other DNA
acacacgttcctctc

SEQ ID NO: 1450 - DNA, 15 bp, synthetic construct
  source 1..15: mol_type = other DNA
agttaacatcaacgc

SEQ ID NO: 1451 - DNA, 15 bp, synthetic construct
  source 1..15: mol_type = other DNA
cagtcaaagatgctc

SEQ ID NO: 1452 - DNA, 15 bp, synthetic construct
  source 1..15: mol_type = other DNA
ggatgcgtgtgggct

SEQ ID NO: 1453 - DNA, 15 bp, synthetic construct
  source 1..15: mol_type = other DNA
cttttggacactctg

SEQ ID NO: 1454 - DNA, 15 bp, synthetic construct
  source 1..15: mol_type = other DNA
ttgctgttcaccagg

SEQ ID NO: 1455 - DNA, 15 bp, synthetic construct
  source 1..15: mol_type = other DNA
ttgagggattgcgag

SEQ ID NO: 1456 - DNA, 15 bp, synthetic construct
  source 1..15: mol_type = other DNA
gccctgtggatggtg

SEQ ID NO: 1457 - DNA, 15 bp, synthetic construct
  source 1..15: mol_type = other DNA
gccggatgctgatgg

SEQ ID NO: 1458 - DNA, 15 bp, synthetic construct
  source 1..15: mol_type = other DNA
tgacgcttacctctg

SEQ ID NO: 1459 - DNA, 15 bp, synthetic construct
  source 1..15: mol_type = other DNA
gtgtggcgcatgagg

SEQ ID NO: 1460 - DNA, 15 bp, synthetic construct
  source 1..15: mol_type = other DNA
actgttgccctcata

SEQ ID NO: 1461 - DNA, 15 bp, synthetic construct
  source 1..15: mol_type = other DNA
tgttggtgctgagga

SEQ ID NO: 1462 - DNA, 15 bp, synthetic construct
  source 1..15: mol_type = other DNA
ccgtgatgaccagta

SEQ ID NO: 1463 - DNA, 15 bp, synthetic construct
  source 1..15: mol_type = other DNA
ggtcaacagcacgtt

SEQ ID NO: 1464 - DNA, 15 bp, synthetic construct
  source 1..15: mol_type = other DNA
gtcctcgaacacgac

SEQ ID NO: 1465 - DNA, 15 bp, synthetic construct
  source 1..15: mol_type = other DNA
ggccaacatagtcag

SEQ ID NO: 1466 - DNA, 15 bp, synthetic construct
  source 1..15: mol_type = other DNA
cgtcagagaggcgga

SEQ ID NO: 1467 - DNA, 15 bp, synthetic construct
  source 1..15: mol_type = other DNA
cagagcaacctaccc

SEQ ID NO: 1468 - DNA, 15 bp, synthetic construct
  source 1..15: mol_type = other DNA
agacaagggcccagt

SEQ ID NO: 1469 - DNA, 15 bp, synthetic construct
  source 1..15: mol_type = other DNA
atacagaatattccc

SEQ ID NO: 1470 - DNA, 15 bp, synthetic construct
  source 1..15: mol_type = other DNA
gtgccggaccagctt

SEQ ID NO: 1471 - DNA, 15 bp, synthetic construct
  source 1..15: mol_type = other DNA
gcaaagaccacctcg

SEQ ID NO: 1472 - DNA, 15 bp, synthetic construct
  source 1..15: mol_type = other DNA
aatagcttccttgca

SEQ ID NO: 1473 - DNA, 15 bp, synthetic construct
  source 1..15: mol_type = other DNA
cctctagtgggatgg

SEQ ID NO: 1474 - DNA, 15 bp, synthetic construct
  source 1..15: mol_type = other DNA
ggtgggtcattgaca

SEQ ID NO: 1475 - DNA, 15 bp, synthetic construct
  source 1..15: mol_type = other DNA
gcggtatgctgcctc

SEQ ID NO: 1476 - DNA, 15 bp, synthetic construct
  source 1..15: mol_type = other DNA
actgacaacgtggcc

SEQ ID NO: 1477 - DNA, 15 bp, synthetic construct
  source 1..15: mol_type = other DNA
gacctagcctttctc

SEQ ID NO: 1478 - DNA, 15 bp, synthetic construct
  source 1..15: mol_type = other DNA
gttttgacagcccaa

SEQ ID NO: 1479 - DNA, 15 bp, synthetic construct
  source 1..15: mol_type = other DNA
actgccaaagaggag

SEQ ID NO: 1480 - DNA, 15 bp, synthetic construct
  source 1..15: mol_type = other DNA
agaggtggtcagcag

SEQ ID NO: 1481 - DNA, 15 bp, synthetic construct
  source 1..15: mol_type = other DNA
acgtagcggatcagc

SEQ ID NO: 1482 - DNA, 15 bp, synthetic construct
  source 1..15: mol_type = other DNA
ctcggttcgaagtat

SEQ ID NO: 1483 - DNA, 15 bp, synthetic construct
  source 1..15: mol_type = other DNA
catgttggcctcaag

SEQ ID NO: 1484 - DNA, 15 bp, synthetic construct
  source 1..15: mol_type = other DNA
caaatgggatatcat

SEQ ID NO: 1485 - DNA, 15 bp, synthetic construct
  source 1..15: mol_type = other DNA
cggaacgtcaagtcc

SEQ ID NO: 1486 - DNA, 15 bp, synthetic construct
  source 1..15: mol_type = other DNA
gagctgtgacacgga

SEQ ID NO: 1487 - DNA, 15 bp, synthetic construct
  source 1..15: mol_type = other DNA
cactagctgccctgc

SEQ ID NO: 1488 - DNA, 15 bp, synthetic construct
  source 1..15: mol_type = other DNA
gtgaaggatgtcacc

SEQ ID NO: 1489 - DNA, 15 bp, synthetic construct
  source 1..15: mol_type = other DNA
gagcggtgttcaggt

SEQ ID NO: 1490 - DNA, 15 bp, synthetic construct
  source 1..15: mol_type = other DNA
cacaaagctggcgat

SEQ ID NO: 1491 - DNA, 15 bp, synthetic construct
  source 1..15: mol_type = other DNA
gtgaggttcacttga

SEQ ID NO: 1492 - DNA, 15 bp, synthetic construct
  source 1..15: mol_type = other DNA
gtgaaacagagccca

SEQ ID NO: 1493 - DNA, 15 bp, synthetic construct
  source 1..15: mol_type = other DNA
ggtgttcaggtcttc

SEQ ID NO: 1494 - DNA, 15 bp, synthetic construct
  source 1..15: mol_type = other DNA
ctcagataccaccag

SEQ ID NO: 1495 - DNA, 15 bp, synthetic construct
  source 1..15: mol_type = other DNA
ctgctatgacctcat

SEQ ID NO: 1496 - DNA, 15 bp, synthetic construct
  source 1..15: mol_type = other DNA
acatagccatgtgag

SEQ ID NO: 1497 - DNA, 15 bp, synthetic construct
  source 1..15: mol_type = other DNA
gaatcatctaggaag

SEQ ID NO: 1498 - DNA, 15 bp, synthetic construct
  source 1..15: mol_type = other DNA
gtcatacctgtgggt

SEQ ID NO: 1499 - DNA, 15 bp, synthetic construct
  source 1..15: mol_type = other DNA
aaatgcactgaatcc

SEQ ID NO: 1500 - DNA, 15 bp, synthetic construct
  source 1..15: mol_type = other DNA
tgtgttctacctggt

SEQ ID NO: 1501 - DNA, 15 bp, synthetic construct
  source 1..15: mol_type = other DNA
ttcaggatcctgaag

SEQ ID NO: 1502 - DNA, 15 bp, synthetic construct
  source 1..15: mol_type = other DNA
gtagtatggcggtgg

SEQ ID NO: 1503 - DNA, 15 bp, synthetic construct
  source 1..15: mol_type = other DNA
gttcagctgagcctt

SEQ ID NO: 1504 - DNA, 15 bp, synthetic construct
  source 1..15: mol_type = other DNA
acagacttcagtcac

SEQ ID NO: 1505 - DNA, 15 bp, synthetic construct
  source 1..15: mol_type = other DNA
aacagctgtgaggag

SEQ ID NO: 1506 - DNA, 15 bp, synthetic construct
  source 1..15: mol_type = other DNA
aaacaggagagtgca

SEQ ID NO: 1507 - DNA, 15 bp, synthetic construct
  source 1..15: mol_type = other DNA
gctctttcaacgaag

SEQ ID NO: 1508 - DNA, 15 bp, synthetic construct
  source 1..15: mol_type = other DNA
cattgaaaggaactg

SEQ ID NO: 1509 - DNA, 15 bp, synthetic construct
  source 1..15: mol_type = other DNA
accaactcagcacaa

SEQ ID NO: 1510 - DNA, 15 bp, synthetic construct
  source 1..15: mol_type = other DNA
ttcacattctggctc

SEQ ID NO: 1511 - DNA, 15 bp, synthetic construct
  source 1..15: mol_type = other DNA
tcccgtgtccatggc

SEQ ID NO: 1512 - DNA, 15 bp, synthetic construct
  source 1..15: mol_type = other DNA
ccattctgccacctg

SEQ ID NO: 1513 - DNA, 15 bp, synthetic construct
  source 1..15: mol_type = other DNA
gattctttgcagagg

SEQ ID NO: 1514 - DNA, 15 bp, synthetic construct
  source 1..15: mol_type = other DNA
aactcatcctcacca

SEQ ID NO: 1515 - DNA, 15 bp, synthetic construct
  source 1..15: mol_type = other DNA
caggtctcttcctct

SEQ ID NO: 1516 - DNA, 15 bp, synthetic construct
  source 1..15: mol_type = other DNA
ccaccatggtagaat

SEQ ID NO: 1517 - DNA, 15 bp, synthetic construct
  source 1..15: mol_type = other DNA
ttgtgcatcgccttc

SEQ ID NO: 1518 - DNA, 15 bp, synthetic construct
  source 1..15: mol_type = other DNA
aaggactcatgacct

SEQ ID NO: 1519 - DNA, 15 bp, synthetic construct
  source 1..15: mol_type = other DNA
attaacaggaacacc

SEQ ID NO: 1520 - DNA, 15 bp, synthetic construct
  source 1..15: mol_type = other DNA
gtatccgacacagcg

SEQ ID NO: 1521 - DNA, 15 bp, synthetic construct
  source 1..15: mol_type = other DNA
agcctcccagttttc

SEQ ID NO: 1522 - DNA, 15 bp, synthetic construct
  source 1..15: mol_type = other DNA
tccacaaagccggtg

SEQ ID NO: 1523 - DNA, 15 bp, synthetic construct
  source 1..15: mol_type = other DNA
aagtagggacaaaga

SEQ ID NO: 1524 - DNA, 15 bp, synthetic construct
  source 1..15: mol_type = other DNA
caaaacacgagatgc

SEQ ID NO: 1525 - DNA, 15 bp, synthetic construct
  source 1..15: mol_type = other DNA
attaggccaccattg

SEQ ID NO: 1526 - DNA, 15 bp, synthetic construct
  source 1..15: mol_type = other DNA
tttgaaagccattca

SEQ ID NO: 1527 - DNA, 15 bp, synthetic construct
  source 1..15: mol_type = other DNA
aagtacacgacttac

SEQ ID NO: 1528 - DNA, 15 bp, synthetic construct
  source 1..15: mol_type = other DNA
gcagccagatatgcc

SEQ ID NO: 1529 - DNA, 15 bp, synthetic construct
  source 1..15: mol_type = other DNA
gctcaaaataaatgc

SEQ ID NO: 1530 - DNA, 15 bp, synthetic construct
  source 1..15: mol_type = other DNA
ccacagttgcaactg

SEQ ID NO: 1531 - DNA, 15 bp, synthetic construct
  source 1..15: mol_type = other DNA
ccacaatggtttctc

SEQ ID NO: 1532 - DNA, 15 bp, synthetic construct
  source 1..15: mol_type = other DNA
ccaggtttcgtgccc

SEQ ID NO: 1533 - DNA, 15 bp, synthetic construct
  source 1..15: mol_type = other DNA
gctcaaggttgcgga

SEQ ID NO: 1534 - DNA, 15 bp, synthetic construct
  source 1..15: mol_type = other DNA
tcaaatccgtagcca

SEQ ID NO: 1535 - DNA, 15 bp, synthetic construct
  source 1..15: mol_type = other DNA
ttggtccgcagagcc

SEQ ID NO: 1536 - DNA, 15 bp, synthetic construct
  source 1..15: mol_type = other DNA
ggtcagaggatgttt

SEQ ID NO: 1537 - DNA, 15 bp, synthetic construct
  source 1..15: mol_type = other DNA
gtaggatctttatgc

SEQ ID NO: 1538 - DNA, 15 bp, synthetic construct
  source 1..15: mol_type = other DNA
tttccctatggtctt

SEQ ID NO: 1539 - DNA, 15 bp, synthetic construct
  source 1..15: mol_type = other DNA
tgagtacaggatggt

SEQ ID NO: 1540 - DNA, 15 bp, synthetic construct
  source 1..15: mol_type = other DNA
atatccttcttcacc

SEQ ID NO: 1541 - DNA, 15 bp, synthetic construct
  source 1..15: mol_type = other DNA
gaatgctccaggttg

SEQ ID NO: 1542 - DNA, 15 bp, synthetic construct
  source 1..15: mol_type = other DNA
accagccgtttcatt

SEQ ID NO: 1543 - DNA, 15 bp, synthetic construct
  source 1..15: mol_type = other DNA
ttagggtttgactta

SEQ ID NO: 1544 - DNA, 15 bp, synthetic construct
  source 1..15: mol_type = other DNA
agaagagcccttgtc

SEQ ID NO: 1545 - DNA, 15 bp, synthetic construct
  source 1..15: mol_type = other DNA
ataggaagcgtctga

SEQ ID NO: 1546 - DNA, 15 bp, synthetic construct
  source 1..15: mol_type = other DNA
agctttcctgttttc

SEQ ID NO: 1547 - DNA, 15 bp, synthetic construct
  source 1..15: mol_type = other DNA
tcccacaatgatttc

SEQ ID NO: 1548 - DNA, 15 bp, synthetic construct
  source 1..15: mol_type = other DNA
tgagacgtcgtactg

SEQ ID NO: 1549 - DNA, 15 bp, synthetic construct
  source 1..15: mol_type = other DNA
atcaccatagccaac

SEQ ID NO: 1550 - DNA, 15 bp, synthetic construct
  source 1..15: mol_type = other DNA
cttgaattagtgggc

SEQ ID NO: 1551 - DNA, 15 bp, synthetic construct
  source 1..15: mol_type = other DNA
agacatcacttcttc

SEQ ID NO: 1552 - DNA, 15 bp, synthetic construct
  source 1..15: mol_type = other DNA
tagggtgtcctgaac

SEQ ID NO: 1553 - DNA, 15 bp, synthetic construct
  source 1..15: mol_type = other DNA
gttcagtgtactttg

SEQ ID NO: 1554 - DNA, 15 bp, synthetic construct
  source 1..15: mol_type = other DNA
cacagcttctttcag

SEQ ID NO: 1555 - DNA, 15 bp, synthetic construct
  source 1..15: mol_type = other DNA
gctccataaggaaat

SEQ ID NO: 1556 - DNA, 15 bp, synthetic construct
  source 1..15: mol_type = other DNA
aactgaaagttagga

SEQ ID NO: 1557 - DNA, 15 bp, synthetic construct
  source 1..15: mol_type = other DNA
atgacgcgcatctac

SEQ ID NO: 1558 - DNA, 15 bp, synthetic construct
  source 1..15: mol_type = other DNA
aatgtcatagggcaa

SEQ ID NO: 1559 - DNA, 15 bp, synthetic construct
  source 1..15: mol_type = other DNA
tgtactggaaagccg

SEQ ID NO: 1560 - DNA, 15 bp, synthetic construct
  source 1..15: mol_type = other DNA
tcctctttgtgtccc

SEQ ID NO: 1561 - DNA, 15 bp, synthetic construct
  source 1..15: mol_type = other DNA
ctgcacaagtgtgga

SEQ ID NO: 1562 - DNA, 15 bp, synthetic construct
  source 1..15: mol_type = other DNA
gcattgcctggtgtg

SEQ ID NO: 1563 - DNA, 15 bp, synthetic construct
  source 1..15: mol_type = other DNA
tcacaactgaaagaa

SEQ ID NO: 1564 - DNA, 15 bp, synthetic construct
  source 1..15: mol_type = other DNA
taccactgcttgtga

SEQ ID NO: 1565 - DNA, 15 bp, synthetic construct
  source 1..15: mol_type = other DNA
gagggactctccaca

SEQ ID NO: 1566 - DNA, 15 bp, synthetic construct
  source 1..15: mol_type = other DNA
atcctcacagatgcc

SEQ ID NO: 1567 - DNA, 15 bp, synthetic construct
  source 1..15: mol_type = other DNA
ggtgatatggaagcc

SEQ ID NO: 1568 - DNA, 15 bp, synthetic construct
  source 1..15: mol_type = other DNA
cgttgccacagactt

SEQ ID NO: 1569 - DNA, 15 bp, synthetic construct
  source 1..15: mol_type = other DNA
aaggaccagtcagga

SEQ ID NO: 1570 - DNA, 15 bp, synthetic construct
  source 1..15: mol_type = other DNA
ctcccttttaactct

SEQ ID NO: 1571 - DNA, 15 bp, synthetic construct
  source 1..15: mol_type = other DNA
tctgtagccattcga

SEQ ID NO: 1572 - DNA, 15 bp, synthetic construct
  source 1..15: mol_type = other DNA
cgggagacacgtgca

SEQ ID NO: 1573 - DNA, 15 bp, synthetic construct
  source 1..15: mol_type = other DNA
tgtggacagttgtcc

SEQ ID NO: 1574 - DNA, 15 bp, synthetic construct
  source 1..15: mol_type = other DNA
gcttcgccatttact

SEQ ID NO: 1575 - DNA, 15 bp, synthetic construct
  source 1..15: mol_type = other DNA
tcttccgtcaccctg

SEQ ID NO: 1576 - DNA, 15 bp, synthetic construct
  source 1..15: mol_type = other DNA
tcctgagtaaatctc

SEQ ID NO: 1577 - DNA, 15 bp, synthetic construct
  source 1..15: mol_type = other DNA
ctccaggatacacgt

SEQ ID NO: 1578 - DNA, 15 bp, synthetic construct
  source 1..15: mol_type = other DNA
tgatgctccaagtga

SEQ ID NO: 1579 - DNA, 15 bp, synthetic construct
  source 1..15: mol_type = other DNA
gcaaggattgctgct

SEQ ID NO: 1580 - DNA, 15 bp, synthetic construct
  source 1..15: mol_type = other DNA
gccgttatttatctc

SEQ ID NO: 1581 - DNA, 15 bp, synthetic construct
  source 1..15: mol_type = other DNA
gaattttctctcaag

SEQ ID NO: 1582 - DNA, 15 bp, synthetic construct
  source 1..15: mol_type = other DNA
tagccatgaaaccat

SEQ ID NO: 1583 - DNA, 15 bp, synthetic construct
  source 1..15: mol_type = other DNA
gtgtcataaacttcc

SEQ ID NO: 1584 - DNA, 15 bp, synthetic construct
  source 1..15: mol_type = other DNA
agtgcactgcaatca

SEQ ID NO: 1585 - DNA, 15 bp, synthetic construct
  source 1..15: mol_type = other DNA
atttcgtcacaccgt

SEQ ID NO: 1586 - DNA, 15 bp, synthetic construct
  source 1..15: mol_type = other DNA
acatctggagaccag

SEQ ID NO: 1587 - DNA, 15 bp, synthetic construct
  source 1..15: mol_type = other DNA
ctgctcatgcataaa

SEQ ID NO: 1588 - DNA, 15 bp, synthetic construct
  source 1..15: mol_type = other DNA
ttgatggtggaacta

SEQ ID NO: 1589 - DNA, 15 bp, synthetic construct
  source 1..15: mol_type = other DNA
gttgatagtggatga

SEQ ID NO: 1590 - DNA, 15 bp, synthetic construct
  source 1..15: mol_type = other DNA
tgctgtcctgagttc

SEQ ID NO: 1591 - DNA, 15 bp, synthetic construct
  source 1..15: mol_type = other DNA
ctagcccttcagagc

SEQ ID NO: 1592 - DNA, 15 bp, synthetic construct
  source 1..15: mol_type = other DNA
ttcagatctgagtca

SEQ ID NO: 1593 - DNA, 15 bp, synthetic construct
  source 1..15: mol_type = other DNA
ccagaaaatacggtg

SEQ ID NO: 1594 - DNA, 15 bp, synthetic construct
  source 1..15: mol_type = other DNA
atgatcctttgttct

SEQ ID NO: 1595 - DNA, 15 bp, synthetic construct
  source 1..15: mol_type = other DNA
agggaacctctaacc

SEQ ID NO: 1596 - DNA, 15 bp, synthetic construct
  source 1..15: mol_type = other DNA
ttcaaggagtgagag

SEQ ID NO: 1597 - DNA, 15 bp, synthetic construct
  source 1..15: mol_type = other DNA
gctctctatggacca

SEQ ID NO: 1598 - DNA, 15 bp, synthetic construct
  source 1..15: mol_type = other DNA
aaacccaactatttg

SEQ ID NO: 1599 - DNA, 15 bp, synthetic construct
  source 1..15: mol_type = other DNA
tgagtcatcctgcct

SEQ ID NO: 1600 - DNA, 15 bp, synthetic construct
  source 1..15: mol_type = other DNA
cccaaatacaggcac

SEQ ID NO: 1601 - DNA, 15 bp, synthetic construct
  source 1..15: mol_type = other DNA
ctgtacaccctggcc

SEQ ID NO: 1602 - DNA, 15 bp, synthetic construct
  source 1..15: mol_type = other DNA
tcacgtggaaccaga

SEQ ID NO: 1603 - DNA, 15 bp, synthetic construct
  source 1..15: mol_type = other DNA
tttaactgacctggg

SEQ ID NO: 1604 - DNA, 15 bp, synthetic construct
  source 1..15: mol_type = other DNA
caactagacacaggc

SEQ ID NO: 1605 - DNA, 15 bp, synthetic construct
  source 1..15: mol_type = other DNA
ccagcccataagagg

SEQ ID NO: 1606 - DNA, 15 bp, synthetic construct
  source 1..15: mol_type = other DNA
cacagagtcatcctg

SEQ ID NO: 1607 - DNA, 15 bp, synthetic construct
  source 1..15: mol_type = other DNA
gaaagaaggtccatt

SEQ ID NO: 1608 - DNA, 15 bp, synthetic construct
  source 1..15: mol_type = other DNA
aagtcactgtgtggg

SEQ ID NO: 1609 - DNA, 15 bp, synthetic construct
  source 1..15: mol_type = other DNA
cctggtaagcacggc

SEQ ID NO: 1610 - DNA, 15 bp, synthetic construct
  source 1..15: mol_type = other DNA
aagaccacgatgtcc

SEQ ID NO: 1611 - DNA, 15 bp, synthetic construct
  source 1..15: mol_type = other DNA
tacacagtctggtag

SEQ ID NO: 1612 - DNA, 15 bp, synthetic construct
  source 1..15: mol_type = other DNA
aggcggtagtgaatt

SEQ ID NO: 1613 - DNA, 15 bp, synthetic construct
  source 1..15: mol_type = other DNA
taaacgcctccaggg

SEQ ID NO: 1614 - DNA, 15 bp, synthetic construct
  source 1..15: mol_type = other DNA
atttgtggtctaacg

SEQ ID NO: 1615 - DNA, 15 bp, synthetic construct
  source 1..15: mol_type = other DNA
agcctcttctgtgtc

SEQ ID NO: 1616 - DNA, 15 bp, synthetic construct
  source 1..15: mol_type = other DNA
tgctgatgacggtga

SEQ ID NO: 1617 - DNA, 15 bp, synthetic construct
  source 1..15: mol_type = other DNA
cacagtcagctctca

SEQ ID NO: 1618 - DNA, 15 bp, synthetic construct
  source 1..15: mol_type = other DNA
tctcagtcacactga

SEQ ID NO: 1619 - DNA, 15 bp, synthetic construct
  source 1..15: mol_type = other DNA
ctgcaagagttggtg

SEQ ID NO: 1620 - DNA, 15 bp, synthetic construct
  source 1..15: mol_type = other DNA
gcttccatcttatat

SEQ ID NO: 1621 - DNA, 15 bp, synthetic construct
  source 1..15: mol_type = other DNA
tcagtgtttggccac

SEQ ID NO: 1622 - DNA, 15 bp, synthetic construct
  source 1..15: mol_type = other DNA
tgtagacttgggagt

SEQ ID NO: 1623 - DNA, 15 bp, synthetic construct
  source 1..15: mol_type = other DNA
tttgggattcccttc

SEQ ID NO: 1624 - DNA, 15 bp, synthetic construct
  source 1..15: mol_type = other DNA
tgacactcttgggct

SEQ ID NO: 1625 - DNA, 15 bp, synthetic construct
  source 1..15: mol_type = other DNA
caccagcagttttct

SEQ ID NO: 1626 - DNA, 15 bp, synthetic construct
  source 1..15: mol_type = other DNA
aacaaggtctggacg

SEQ ID NO: 1627 - DNA, 15 bp, synthetic construct
  source 1..15: mol_type = other DNA
acgtggactgagcgc

SEQ ID NO: 1628 - DNA, 15 bp, synthetic construct
  source 1..15: mol_type = other DNA
aaggtatcttctgaa

SEQ ID NO: 1629 - DNA, 15 bp, synthetic construct
  source 1..15: mol_type = other DNA
tgagaagccaagcat

SEQ ID NO: 1630 - DNA, 15 bp, synthetic construct
  source 1..15: mol_type = other DNA
aggtaccttatccct

SEQ ID NO: 1631 - DNA, 15 bp, synthetic construct
  source 1..15: mol_type = other DNA
tgttttgtgtgcatt

SEQ ID NO: 1632 - DNA, 15 bp, synthetic construct
  source 1..15: mol_type = other DNA
tgtggcatttgtttt

SEQ ID NO: 1633 - DNA, 15 bp, synthetic construct
  source 1..15: mol_type = other DNA
agactggaggttcct

SEQ ID NO: 1634 - DNA, 15 bp, synthetic construct
  source 1..15: mol_type = other DNA
aaaattggcttgcag

SEQ ID NO: 1635 - DNA, 15 bp, synthetic construct
  source 1..15: mol_type = other DNA
gaagcactgcatcga

SEQ ID NO: 1636 - DNA, 15 bp, synthetic construct
  source 1..15: mol_type = other DNA
agaaagataaggcag

SEQ ID NO: 1637 - DNA, 15 bp, synthetic construct
  source 1..15: mol_type = other DNA
ttagtacccttggaa

SEQ ID NO: 1638 - DNA, 15 bp, synthetic construct
  source 1..15: mol_type = other DNA
ttgatggccttcgat

SEQ ID NO: 1639 - DNA, 15 bp, synthetic construct
  source 1..15: mol_type = other DNA
tatgtaggtagccac

SEQ ID NO: 1640 - DNA, 15 bp, synthetic construct
  source 1..15: mol_type = other DNA
caggtacagcgtaca

SEQ ID NO: 1641 - DNA, 15 bp, synthetic construct
  source 1..15: mol_type = other DNA
ggaaatatttgaagc

SEQ ID NO: 1642 - DNA, 15 bp, synthetic construct
  source 1..15: mol_type = other DNA
acctcagtagagctt

SEQ ID NO: 1643 - DNA, 15 bp, synthetic construct
  source 1..15: mol_type = other DNA
gggaagtgatgggag

SEQ ID NO: 1644 - DNA, 15 bp, synthetic construct
  source 1..15: mol_type = other DNA
atttggtgaccatca

SEQ ID NO: 1645 - DNA, 15 bp, synthetic construct
  source 1..15: mol_type = other DNA
tactgaatagcttag

SEQ ID NO: 1646 - DNA, 15 bp, synthetic construct
  source 1..15: mol_type = other DNA
tgccactttcactgc

SEQ ID NO: 1647 - DNA, 15 bp, synthetic construct
  source 1..15: mol_type = other DNA
gaattctgattgtca

SEQ ID NO: 1648 - DNA, 15 bp, synthetic construct
  source 1..15: mol_type = other DNA
tgacatcacatgagg

SEQ ID NO: 1649 - DNA, 15 bp, synthetic construct
  source 1..15: mol_type = other DNA
cttcacactcatgtt

SEQ ID NO: 1650 - DNA, 15 bp, synthetic construct
  source 1..15: mol_type = other DNA
tttgtagatgtgtgg

SEQ ID NO: 1651 - DNA, 15 bp, synthetic construct
  source 1..15: mol_type = other DNA
tcacccacctttcat

SEQ ID NO: 1652 - DNA, 15 bp, synthetic construct
  source 1..15: mol_type = other DNA
tcttttgaacatggg

SEQ ID NO: 1653 - DNA, 15 bp, synthetic construct
  source 1..15: mol_type = other DNA
ggttctctagcctag

SEQ ID NO: 1654 - DNA, 15 bp, synthetic construct
  source 1..15: mol_type = other DNA
cactttcctctcctc

SEQ ID NO: 1655 - DNA, 15 bp, synthetic construct
  source 1..15: mol_type = other DNA
gatttgggatttagg

SEQ ID NO: 1656 - DNA, 15 bp, synthetic construct
  source 1..15: mol_type = other DNA
tcaatgtctccaccg

SEQ ID NO: 1657 - DNA, 15 bp, synthetic construct
  source 1..15: mol_type = other DNA
ttttgccagtatccc

SEQ ID NO: 1658 - DNA, 15 bp, synthetic construct
  source 1..15: mol_type = other DNA
cttaaggtagctttt

SEQ ID NO: 1659 - DNA, 15 bp, synthetic construct
  source 1..15: mol_type = other DNA
tttcaaactttctgc

SEQ ID NO: 1660 - DNA, 15 bp, synthetic construct
  source 1..15: mol_type = other DNA
tgctcttttccagga

SEQ ID NO: 1661 - DNA, 15 bp, synthetic construct
  source 1..15: mol_type = other DNA
ggattgtgacttgtt

SEQ ID NO: 1662 - DNA, 15 bp, synthetic construct
  source 1..15: mol_type = other DNA
ccctcatctggtgag

SEQ ID NO: 1663 - DNA, 15 bp, synthetic construct
  source 1..15: mol_type = other DNA
gaatgtctccctaca

SEQ ID NO: 1664 - DNA, 15 bp, synthetic construct
  source 1..15: mol_type = other DNA
tgacgttggctctgg

SEQ ID NO: 1665 - DNA, 15 bp, synthetic construct
  source 1..15: mol_type = other DNA
gggaagctctgtaga

SEQ ID NO: 1666 - DNA, 15 bp, synthetic construct
  source 1..15: mol_type = other DNA
tataggaattggcct

SEQ ID NO: 1667 - DNA, 15 bp, synthetic construct
  source 1..15: mol_type = other DNA
gacacacatgatgat

SEQ ID NO: 1668 - DNA, 15 bp, synthetic construct
  source 1..15: mol_type = other DNA
cttggcgttcatggc

SEQ ID NO: 1669 - DNA, 15 bp, synthetic construct
  source 1..15: mol_type = other DNA
tgccctcagtggaag

SEQ ID NO: 1670 - DNA, 15 bp, synthetic construct
  source 1..15: mol_type = other DNA
ccttttttctcagga

SEQ ID NO: 1671 - DNA, 15 bp, synthetic construct
  source 1..15: mol_type = other DNA
acaaagcccttggca

SEQ ID NO: 1672 - DNA, 15 bp, synthetic construct
  source 1..15: mol_type = other DNA
gcatgggcatctgta

SEQ ID NO: 1673 - DNA, 15 bp, synthetic construct
  source 1..15: mol_type = other DNA
tcgccagtgacactg

SEQ ID NO: 1674 - DNA, 15 bp, synthetic construct
  source 1..15: mol_type = other DNA
ttttccagctccctg

SEQ ID NO: 1675 - DNA, 15 bp, synthetic construct
  source 1..15: mol_type = other DNA
ttgtcaaaagtgaac

SEQ ID NO: 1676 - DNA, 15 bp, synthetic construct
  source 1..15: mol_type = other DNA
gcacagactcaatcc

SEQ ID NO: 1677 - DNA, 15 bp, synthetic construct
  source 1..15: mol_type = other DNA
accttctgtggatcg

SEQ ID NO: 1678 - DNA, 15 bp, synthetic construct
  source 1..15: mol_type = other DNA
cggagagtgaaagtg

SEQ ID NO: 1679 - DNA, 15 bp, synthetic construct
  source 1..15: mol_type = other DNA
tgttttcaggtaaca

SEQ ID NO: 1680 - DNA, 15 bp, synthetic construct
  source 1..15: mol_type = other DNA
aagcgccgagagcaa

SEQ ID NO: 1681 - DNA, 15 bp, synthetic construct
  source 1..15: mol_type = other DNA
ccagtcagacgatca

SEQ ID NO: 1682 - DNA, 15 bp, synthetic construct
  source 1..15: mol_type = other DNA
actcaaagcgagctc

SEQ ID NO: 1683 - DNA, 15 bp, synthetic construct
  source 1..15: mol_type = other DNA
gcttcgggtcaatgc

SEQ ID NO: 1684 - DNA, 15 bp, synthetic construct
  source 1..15: mol_type = other DNA
ggtctagcggaaagt

SEQ ID NO: 1685 - DNA, 15 bp, synthetic construct
  source 1..15: mol_type = other DNA
tcttcacatagcaca

SEQ ID NO: 1686 - DNA, 15 bp, synthetic construct
  source 1..15: mol_type = other DNA
gactagcagttcgaa

SEQ ID NO: 1687 - DNA, 15 bp, synthetic construct
  source 1..15: mol_type = other DNA
ttcatctctcacaag

SEQ ID NO: 1688 - DNA, 15 bp, synthetic construct
  source 1..15: mol_type = other DNA
actgagctctcttgg

SEQ ID NO: 1689 - DNA, 15 bp, synthetic construct
  source 1..15: mol_type = other DNA
aaccattcccacggg

SEQ ID NO: 1690 - DNA, 15 bp, synthetic construct
  source 1..15: mol_type = other DNA
tgtgtacatcaccct

SEQ ID NO: 1691 - DNA, 15 bp, synthetic construct
  source 1..15: mol_type = other DNA
tcctccgtagtgagt

SEQ ID NO: 1692 - DNA, 15 bp, synthetic construct
  source 1..15: mol_type = other DNA
gatgaacttcattct

SEQ ID NO: 1693 - DNA, 15 bp, synthetic construct
  source 1..15: mol_type = other DNA
acttgagctctgagt

SEQ ID NO: 1694 - DNA, 15 bp, synthetic construct
  source 1..15: mol_type = other DNA
ttgacttgttcttct

SEQ ID NO: 1695 - DNA, 15 bp, synthetic construct
  source 1..15: mol_type = other DNA
ttgcctcttgacagg

SEQ ID NO: 1696 - DNA, 15 bp, synthetic construct
  source 1..15: mol_type = other DNA
tctatgaagtctggg

SEQ ID NO: 1697 - DNA, 15 bp, synthetic construct
  source 1..15: mol_type = other DNA
gaagaatgcaggtgt

SEQ ID NO: 1698 - DNA, 15 bp, synthetic construct
  source 1..15: mol_type = other DNA
tgtgtaatagacctc

SEQ ID NO: 1699 - DNA, 15 bp, synthetic construct
  source 1..15: mol_type = other DNA
tcatagaagcctgct

SEQ ID NO: 1700 - DNA, 15 bp, synthetic construct
  source 1..15: mol_type = other DNA
aatctgggtttagac

SEQ ID NO: 1701 - DNA, 15 bp, synthetic construct
  source 1..15: mol_type = other DNA
ttcacccatgtggta

SEQ ID NO: 1702 - DNA, 15 bp, synthetic construct
  source 1..15: mol_type = other DNA
ccagaaaggaggctc

SEQ ID NO: 1703 - DNA, 15 bp, synthetic construct
  source 1..15: mol_type = other DNA
aggtaagtgggtcac

SEQ ID NO: 1704 - DNA, 15 bp, synthetic construct
  source 1..15: mol_type = other DNA
tgtgtagacatgggt

SEQ ID NO: 1705 - DNA, 15 bp, synthetic construct
  source 1..15: mol_type = other DNA
caaagacaatcatag

SEQ ID NO: 1706 - DNA, 15 bp, synthetic construct
  source 1..15: mol_type = other DNA
attattaggcactgt

SEQ ID NO: 1707 - DNA, 15 bp, synthetic construct
  source 1..15: mol_type = other DNA
aaggttggtcactgg

SEQ ID NO: 1708 - DNA, 15 bp, synthetic construct
  source 1..15: mol_type = other DNA
agcaagatgatgccc

SEQ ID NO: 1709 - DNA, 15 bp, synthetic construct
  source 1..15: mol_type = other DNA
ggaactagggagttt

SEQ ID NO: 1710 - DNA, 15 bp, synthetic construct
  source 1..15: mol_type = other DNA
actgagtgaggatga

SEQ ID NO: 1711 - DNA, 15 bp, synthetic construct
  source 1..15: mol_type = other DNA
caccggacagcactc

SEQ ID NO: 1712 - DNA, 15 bp, synthetic construct
  source 1..15: mol_type = other DNA
gcatatgacaggtgc

SEQ ID NO: 1713 - DNA, 15 bp, synthetic construct
  source 1..15: mol_type = other DNA
cttaggacttgctga

SEQ ID NO: 1714 - DNA, 15 bp, synthetic construct
  source 1..15: mol_type = other DNA
tccttcgggaaaagg

SEQ ID NO: 1715 - DNA, 15 bp, synthetic construct
  source 1..15: mol_type = other DNA
agtgttttaccacgt

SEQ ID NO: 1716 - DNA, 15 bp, synthetic construct
  source 1..15: mol_type = other DNA
ttttgagcctgagaa

SEQ ID NO: 1717 - DNA, 15 bp, synthetic construct
  source 1..15: mol_type = other DNA
ggtggatagtccctt

SEQ ID NO: 1718 - DNA, 15 bp, synthetic construct
  source 1..15: mol_type = other DNA
ttagaaagctgaggc

SEQ ID NO: 1719 - DNA, 15 bp, synthetic construct
  source 1..15: mol_type = other DNA
accgacttggctgct

SEQ ID NO: 1720 - DNA, 15 bp, synthetic construct
  source 1..15: mol_type = other DNA
accgttccctttctt

SEQ ID NO: 1721 - DNA, 15 bp, synthetic construct
  source 1..15: mol_type = other DNA
tttctcactactggg

SEQ ID NO: 1722 - DNA, 15 bp, synthetic construct
  source 1..15: mol_type = other DNA
aatgatagcggtata

SEQ ID NO: 1723 - DNA, 15 bp, synthetic construct
  source 1..15: mol_type = other DNA
tgcattgtggtagga

SEQ ID NO: 1724 - DNA, 15 bp, synthetic construct
  source 1..15: mol_type = other DNA
tcggccacagttgcg

SEQ ID NO: 1725 - DNA, 15 bp, synthetic construct
  source 1..15: mol_type = other DNA
gtcactctcgttttc

SEQ ID NO: 1726 - DNA, 15 bp, synthetic construct
  source 1..15: mol_type = other DNA
gagggcgaaaagcag

SEQ ID NO: 1727 - DNA, 15 bp, synthetic construct
  source 1..15: mol_type = other DNA
ttagcacttggtggt

SEQ ID NO: 1728 - DNA, 15 bp, synthetic construct
  source 1..15: mol_type = other DNA
acctgccactttgca

SEQ ID NO: 1729 - DNA, 15 bp, synthetic construct
  source 1..15: mol_type = other DNA
tttactctgagcagc

SEQ ID NO: 1730 - DNA, 15 bp, synthetic construct
  source 1..15: mol_type = other DNA
cctacaaaggcatag

SEQ ID NO: 1731 - DNA, 15 bp, synthetic construct
  source 1..15: mol_type = other DNA
gtgatcccatcggcc

SEQ ID NO: 1732 - DNA, 15 bp, synthetic construct
  source 1..15: mol_type = other DNA
ctatgttcaggtagc

SEQ ID NO: 1733 - DNA, 15 bp, synthetic construct
  source 1..15: mol_type = other DNA
gaagtcctgtgggca

SEQ ID NO: 1734 - DNA, 15 bp, synthetic construct
  source 1..15: mol_type = other DNA
tgaagttctccagga

SEQ ID NO: 1735 - DNA, 15 bp, synthetic construct
  source 1..15: mol_type = other DNA
gggaagacgatggct

SEQ ID NO: 1736 - DNA, 15 bp, synthetic construct
  source 1..15: mol_type = other DNA
gcaggaactcttttg

SEQ ID NO: 1737 - DNA, 15 bp, synthetic construct
  source 1..15: mol_type = other DNA
aaatgagaagggcag

SEQ ID NO: 1738 - DNA, 15 bp, synthetic construct
  source 1..15: mol_type = other DNA
caatgtagtaaggca

SEQ ID NO: 1739 - DNA, 15 bp, synthetic construct
  source 1..15: mol_type = other DNA
aacaaacacgcaccc

SEQ ID NO: 1740 - DNA, 15 bp, synthetic construct
  source 1..15: mol_type = other DNA
aaagattccaatcct

SEQ ID NO: 1741 - DNA, 15 bp, synthetic construct
  source 1..15: mol_type = other DNA
tgccatcttctacag

SEQ ID NO: 1742 - DNA, 15 bp, synthetic construct
  source 1..15: mol_type = other DNA
aaacagcgtgcaagc

SEQ ID NO: 1743 - DNA, 15 bp, synthetic construct
  source 1..15: mol_type = other DNA
ccctcaaacccaaag

SEQ ID NO: 1744 - DNA, 15 bp, synthetic construct
  source 1..15: mol_type = other DNA
tggaacacaaccacc

SEQ ID NO: 1745 - DNA, 15 bp, synthetic construct
  source 1..15: mol_type = other DNA
cacgctctggaatgt

SEQ ID NO: 1746 - DNA, 15 bp, synthetic construct
  source 1..15: mol_type = other DNA
tttccagtcgtttct

SEQ ID NO: 1747 - DNA, 15 bp, synthetic construct
  source 1..15: mol_type = other DNA
cctaccacgagacat

SEQ ID NO: 1748 - DNA, 15 bp, synthetic construct
  source 1..15: mol_type = other DNA
gagaggatcttgagg

SEQ ID NO: 1749 - DNA, 15 bp, synthetic construct
  source 1..15: mol_type = other DNA
aagaaagctagggcc

SEQ ID NO: 1750 - DNA, 15 bp, synthetic construct
  source 1..15: mol_type = other DNA
aacatagaccacctt

SEQ ID NO: 1751 - DNA, 15 bp, synthetic construct
  source 1..15: mol_type = other DNA
gatgacaataccagg

SEQ ID NO: 1752 - DNA, 15 bp, synthetic construct
  source 1..15: mol_type = other DNA
tacactgtaggtgct

SEQ ID NO: 1753 - DNA, 15 bp, synthetic construct
  source 1..15: mol_type = other DNA
cacaatgccagttaa

SEQ ID NO: 1754 - DNA, 15 bp, synthetic construct
  source 1..15: mol_type = other DNA
tgtagttatctgaag

SEQ ID NO: 1755 - DNA, 15 bp, synthetic construct
  source 1..15: mol_type = other DNA
ctcagaggatcggcg

SEQ ID NO: 1756 - DNA, 15 bp, synthetic construct
  source 1..15: mol_type = other DNA
ggttctccagatgcg

SEQ ID NO: 1757 - DNA, 15 bp, synthetic construct
  source 1..15: mol_type = other DNA
tcactgacgttggca

SEQ ID NO: 1758 - DNA, 15 bp, synthetic construct
  source 1..15: mol_type = other DNA
gtgcacagtgttctc

SEQ ID NO: 1759 - DNA, 15 bp, synthetic construct
  source 1..15: mol_type = other DNA
atggagagattatct

SEQ ID NO: 1760 - DNA, 15 bp, synthetic construct
  source 1..15: mol_type = other DNA
atgcttctcagtttc

SEQ ID NO: 1761 - DNA, 15 bp, synthetic construct
  source 1..15: mol_type = other DNA
agtaccagtttgcca

SEQ ID NO: 1762 - DNA, 15 bp, synthetic construct
  source 1..15: mol_type = other DNA
agcgggtagttcatg

SEQ ID NO: 1763 - DNA, 15 bp, synthetic construct
  source 1..15: mol_type = other DNA
cccaaatgaggatac

SEQ ID NO: 1764 - DNA, 15 bp, synthetic construct
  source 1..15: mol_type = other DNA
gtttttagggactga

SEQ ID NO: 1765 - DNA, 15 bp, synthetic construct
  source 1..15: mol_type = other DNA
gaatcgggaggtgaa

SEQ ID NO: 1766 - DNA, 15 bp, synthetic construct
  source 1..15: mol_type = other DNA
gtcactgtcttatgt

SEQ ID NO: 1767 - DNA, 15 bp, synthetic construct
  source 1..15: mol_type = other DNA
atgacccactcctaa

SEQ ID NO: 1768 - DNA, 15 bp, synthetic construct
  source 1..15: mol_type = other DNA
ctatagcttatggga

SEQ ID NO: 1769 - DNA, 15 bp, synthetic construct
  source 1..15: mol_type = other DNA
gggcagaagtagaag

SEQ ID NO: 1770 - DNA, 15 bp, synthetic construct
  source 1..15: mol_type = other DNA
gtcaagatgactgca

SEQ ID NO: 1771 - DNA, 15 bp, synthetic construct
  source 1..15: mol_type = other DNA
ggcgaaagtgtagag

SEQ ID NO: 1772 - DNA, 15 bp, synthetic construct
  source 1..15: mol_type = other DNA
actttgtgcagggca

SEQ ID NO: 1773 - DNA, 15 bp, synthetic construct
  source 1..15: mol_type = other DNA
tgtcttctaccagga

SEQ ID NO: 1774 - DNA, 15 bp, synthetic construct
  source 1..15: mol_type = other DNA
gaagccatatacgac

SEQ ID NO: 1775 - DNA, 15 bp, synthetic construct
  source 1..15: mol_type = other DNA
agtcagtgcacctcc

SEQ ID NO: 1776 - DNA, 15 bp, synthetic construct
  source 1..15: mol_type = other DNA
tggatgcccgggcat

SEQ ID NO: 1777 - DNA, 15 bp, synthetic construct
  source 1..15: mol_type = other DNA
tttcttgcttctcgg

SEQ ID NO: 1778 - DNA, 15 bp, synthetic construct
  source 1..15: mol_type = other DNA
tcctcgttgtcctgc

SEQ ID NO: 1779 - DNA, 15 bp, synthetic construct
  source 1..15: mol_type = other DNA
gttatagttgtccaa

SEQ ID NO: 1780 - DNA, 15 bp, synthetic construct
  source 1..15: mol_type = other DNA
cttgcgaggagatac

SEQ ID NO: 1781 - DNA, 15 bp, synthetic construct
  source 1..15: mol_type = other DNA
ggtggcattctctga

SEQ ID NO: 1782 - DNA, 15 bp, synthetic construct
  source 1..15: mol_type = other DNA
gaacatgtgtgcacg

SEQ ID NO: 1783 - DNA, 15 bp, synthetic construct
  source 1..15: mol_type = other DNA
ctgcctaaggtgatg

SEQ ID NO: 1784 - DNA, 15 bp, synthetic construct
  source 1..15: mol_type = other DNA
cccagtttgggatga

SEQ ID NO: 1785 - DNA, 15 bp, synthetic construct
  source 1..15: mol_type = other DNA
ccattcctgtctcgt

SEQ ID NO: 1786 - DNA, 15 bp, synthetic construct
  source 1..15: mol_type = other DNA
tcatgaagcaaggtc

SEQ ID NO: 1787 - DNA, 15 bp, synthetic construct
  source 1..15: mol_type = other DNA
tagcctaaccagcca

SEQ ID NO: 1788 - DNA, 15 bp, synthetic construct
  source 1..15: mol_type = other DNA
ataaacaaagcctgc

SEQ ID NO: 1789 - DNA, 15 bp, synthetic construct
  source 1..15: mol_type = other DNA
ctaaacccacccact

SEQ ID NO: 1790 - DNA, 15 bp, synthetic construct
  source 1..15: mol_type = other DNA
tcgtcatggtaacca

SEQ ID NO: 1791 - DNA, 15 bp, synthetic construct
  source 1..15: mol_type = other DNA
gaattgttctggagg

SEQ ID NO: 1792 - DNA, 15 bp, synthetic construct
  source 1..15: mol_type = other DNA
ggactgcagatactc

SEQ ID NO: 1793 - DNA, 15 bp, synthetic construct
  source 1..15: mol_type = other DNA
tcataggagtcacat

SEQ ID NO: 1794 - DNA, 15 bp, synthetic construct
  source 1..15: mol_type = other DNA
gaacacctgtgagtc

SEQ ID NO: 1795 - DNA, 15 bp, synthetic construct
  source 1..15: mol_type = other DNA
aggaagtcttgatgc

SEQ ID NO: 1796 - DNA, 15 bp, synthetic construct
  source 1..15: mol_type = other DNA
tagtgtagatgccca

SEQ ID NO: 1797 - DNA, 15 bp, synthetic construct
  source 1..15: mol_type = other DNA
gaaacaaagcataga

SEQ ID NO: 1798 - DNA, 15 bp, synthetic construct
  source 1..15: mol_type = other DNA
ttacagttgttggca

SEQ ID NO: 1799 - DNA, 15 bp, synthetic construct
  source 1..15: mol_type = other DNA
catgcctgagaagaa

SEQ ID NO: 1800 - DNA, 15 bp, synthetic construct
  source 1..15: mol_type = other DNA
atgcctgcataggcc

SEQ ID NO: 1801 - DNA, 15 bp, synthetic construct
  source 1..15: mol_type = other DNA
attgatgtgagaccc

SEQ ID NO: 1802 - DNA, 15 bp, synthetic construct
  source 1..15: mol_type = other DNA
tggaacatgctggtg

SEQ ID NO: 1803 - DNA, 15 bp, synthetic construct
  source 1..15: mol_type = other DNA
tcatgctctgccatg

SEQ ID NO: 1804 - DNA, 15 bp, synthetic construct
  source 1..15: mol_type = other DNA
ttctaccatcagagc

SEQ ID NO: 1805 - DNA, 15 bp, synthetic construct
  source 1..15: mol_type = other DNA
cctgctatcccattg

SEQ ID NO: 1806 - DNA, 15 bp, synthetic construct
  source 1..15: mol_type = other DNA
gaaaattctcaggat

SEQ ID NO: 1807 - DNA, 15 bp, synthetic construct
  source 1..15: mol_type = other DNA
gcatataaacgatga

SEQ ID NO: 1808 - DNA, 15 bp, synthetic construct
  source 1..15: mol_type = other DNA
ggctgacaaaggcat

SEQ ID NO: 1809 - DNA, 15 bp, synthetic construct
  source 1..15: mol_type = other DNA
agagcaacactgatg

SEQ ID NO: 1810 - DNA, 15 bp, synthetic construct
  source 1..15: mol_type = other DNA
ttctcatctgacagc

SEQ ID NO: 1811 - DNA, 15 bp, synthetic construct
  source 1..15: mol_type = other DNA
ttgctcagcctagtt

SEQ ID NO: 1812 - DNA, 15 bp, synthetic construct
  source 1..15: mol_type = other DNA
ttcttggtggttgtg

SEQ ID NO: 1813 - DNA, 15 bp, synthetic construct
  source 1..15: mol_type = other DNA
gttgacccatagctt

SEQ ID NO: 1814 - DNA, 15 bp, synthetic construct
  source 1..15: mol_type = other DNA
aactgtcaccttcag

SEQ ID NO: 1815 - DNA, 15 bp, synthetic construct
  source 1..15: mol_type = other DNA
tgcaagctcaatgca

SEQ ID NO: 1816 - DNA, 15 bp, synthetic construct
  source 1..15: mol_type = other DNA
tctaacttgctgaag

SEQ ID NO: 1817 - DNA, 15 bp, synthetic construct
  source 1..15: mol_type = other DNA
tgcagcaggatagcc

SEQ ID NO: 1818 - DNA, 15 bp, synthetic construct
  source 1..15: mol_type = other DNA
gttgtctctggaggg

SEQ ID NO: 1819 - DNA, 15 bp, synthetic construct
  source 1..15: mol_type = other DNA
ttcaggccattctgg

SEQ ID NO: 1820 - DNA, 15 bp, synthetic construct
  source 1..15: mol_type = other DNA
caggacctcagcctc

SEQ ID NO: 1821 - DNA, 15 bp, synthetic construct
  source 1..15: mol_type = other DNA
ccattactgatgagg

SEQ ID NO: 1822 - DNA, 15 bp, synthetic construct
  source 1..15: mol_type = other DNA
gtcactgataccacc

SEQ ID NO: 1823 - DNA, 15 bp, synthetic construct
  source 1..15: mol_type = other DNA
ataccagacagaaga

SEQ ID NO: 1824 - DNA, 15 bp, synthetic construct
  source 1..15: mol_type = other DNA
aaccctagcaggcct

SEQ ID NO: 1825 - DNA, 15 bp, synthetic construct
  source 1..15: mol_type = other DNA
ggatctgcagcacgt

SEQ ID NO: 1826 - DNA, 15 bp, synthetic construct
  source 1..15: mol_type = other DNA
ggagattgggaaaag

SEQ ID NO: 1827 - DNA, 15 bp, synthetic construct
  source 1..15: mol_type = other DNA
tcacgcccagtggca

SEQ ID NO: 1828 - DNA, 15 bp, synthetic construct
  source 1..15: mol_type = other DNA
tgagtttcaggctga

SEQ ID NO: 1829 - DNA, 15 bp, synthetic construct
  source 1..15: mol_type = other DNA
gcagctgcatttgga

SEQ ID NO: 1830 - DNA, 15 bp, synthetic construct
  source 1..15: mol_type = other DNA
ctgcttctcctgaca

SEQ ID NO: 1831 - DNA, 15 bp, synthetic construct
  source 1..15: mol_type = other DNA
gctccttgaccatct

SEQ ID NO: 1832 - DNA, 15 bp, synthetic construct
  source 1..15: mol_type = other DNA
agggatgaagtcagc

SEQ ID NO: 1833 - DNA, 15 bp, synthetic construct
  source 1..15: mol_type = other DNA
cttgcccacagccca

SEQ ID NO: 1834 - DNA, 15 bp, synthetic construct
  source 1..15: mol_type = other DNA
gctggtagtagtcca

SEQ ID NO: 1835 - DNA, 15 bp, synthetic construct
  source 1..15: mol_type = other DNA
ttcttgttcagcaga

SEQ ID NO: 1836 - DNA, 15 bp, synthetic construct
  source 1..15: mol_type = other DNA
ccgctcgtcgaagtg

SEQ ID NO: 1837 - DNA, 15 bp, synthetic construct
  source 1..15: mol_type = other DNA
cacctctgaagggct

SEQ ID NO: 1838 - DNA, 15 bp, synthetic construct
  source 1..15: mol_type = other DNA
tacatcaaaggtgtc

SEQ ID NO: 1839 - DNA, 15 bp, synthetic construct
  source 1..15: mol_type = other DNA
aagctattttggtgt

SEQ ID NO: 1840 - DNA, 15 bp, synthetic construct
  source 1..15: mol_type = other DNA
cgacagagttcgggt

SEQ ID NO: 1841 - DNA, 15 bp, synthetic construct
  source 1..15: mol_type = other DNA
acgttcaccgaccag

SEQ ID NO: 1842 - DNA, 15 bp, synthetic construct
  source 1..15: mol_type = other DNA
acagcaggatataag

SEQ ID NO: 1843 - DNA, 15 bp, synthetic construct
  source 1..15: mol_type = other DNA
catctcctcaatcag

SEQ ID NO: 1844 - DNA, 15 bp, synthetic construct
  source 1..15: mol_type = other DNA
catgatggacttcaa

SEQ ID NO: 1845 - DNA, 15 bp, synthetic construct
  source 1..15: mol_type = other DNA
tggagccacgtatgt

SEQ ID NO: 1846 - DNA, 15 bp, synthetic construct
  source 1..15: mol_type = other DNA
gcggagtagagagct

SEQ ID NO: 1847 - DNA, 15 bp, synthetic construct
  source 1..15: mol_type = other DNA
aagtgacgtagagga

SEQ ID NO: 1848 - DNA, 15 bp, synthetic construct
  source 1..15: mol_type = other DNA
cctgaaggcacatca

SEQ ID NO: 1849 - DNA, 15 bp, synthetic construct
  source 1..15: mol_type = other DNA
tcgaccaacagcatc

SEQ ID NO: 1850 - DNA, 15 bp, synthetic construct
  source 1..15: mol_type = other DNA
aatgcggcgcttcgc

SEQ ID NO: 1851 - DNA, 15 bp, synthetic construct
  source 1..15: mol_type = other DNA
attgttctcactccc

SEQ ID NO: 1852 - DNA, 15 bp, synthetic construct
  source 1..15: mol_type = other DNA
cggaacttctccggt

SEQ ID NO: 1853 - DNA, 15 bp, synthetic construct
  source 1..15: mol_type = other DNA
ctactgacagctgat

SEQ ID NO: 1854 - DNA, 15 bp, synthetic construct
  source 1..15: mol_type = other DNA
acgatgttcaggcta

SEQ ID NO: 1855 - DNA, 15 bp, synthetic construct
  source 1..15: mol_type = other DNA
agctggaatctggaa

SEQ ID NO: 1856 - DNA, 15 bp, synthetic construct
  source 1..15: mol_type = other DNA
ttgttagtggaagta

SEQ ID NO: 1857 - DNA, 15 bp, synthetic construct
  source 1..15: mol_type = other DNA
tggtcatcaccactt

SEQ ID NO: 1858 - DNA, 15 bp, synthetic construct
  source 1..15: mol_type = other DNA
gagatagcaaggtcc

SEQ ID NO: 1859 - DNA, 15 bp, synthetic construct
  source 1..15: mol_type = other DNA
gctcagcgacagcag

SEQ ID NO: 1860 - DNA, 15 bp, synthetic construct
  source 1..15: mol_type = other DNA
gttcggcaatagcag

SEQ ID NO: 1861 - DNA, 15 bp, synthetic construct
  source 1..15: mol_type = other DNA
gaatcttgcactgct

SEQ ID NO: 1862 - DNA, 15 bp, synthetic construct
  source 1..15: mol_type = other DNA
gctcatggtgacggc

SEQ ID NO: 1863 - DNA, 15 bp, synthetic construct
  source 1..15: mol_type = other DNA
gcacttcatgctgct

SEQ ID NO: 1864 - DNA, 15 bp, synthetic construct
  source 1..15: mol_type = other DNA
tggtctcatactgag

SEQ ID NO: 1865 - DNA, 15 bp, synthetic construct
  source 1..15: mol_type = other DNA
tcttgatcatcaccg

SEQ ID NO: 1866 - DNA, 15 bp, synthetic construct
  source 1..15: mol_type = other DNA
tctcctcgttgagag

SEQ ID NO: 1867 - DNA, 15 bp, synthetic construct
  source 1..15: mol_type = other DNA
gtgccggatttcctc

SEQ ID NO: 1868 - DNA, 15 bp, synthetic construct
  source 1..15: mol_type = other DNA
cgtcaccgagctgga

SEQ ID NO: 1869 - DNA, 15 bp, synthetic construct
  source 1..15: mol_type = other DNA
caggtcaatgcgagc

SEQ ID NO: 1870 - DNA, 15 bp, synthetic construct
  source 1..15: mol_type = other DNA
ctccaattcccgcat

SEQ ID NO: 1871 - DNA, 15 bp, synthetic construct
  source 1..15: mol_type = other DNA
ggtgtaggactggat

SEQ ID NO: 1872 - DNA, 15 bp, synthetic construct
  source 1..15: mol_type = other DNA
ggattccgagcttga

SEQ ID NO: 1873 - DNA, 15 bp, synthetic construct
  source 1..15: mol_type = other DNA
catttcctgttccaa

SEQ ID NO: 1874 - DNA, 15 bp, synthetic construct
  source 1..15: mol_type = other DNA
tgaagacatcatagc

SEQ ID NO: 1875 - DNA, 15 bp, synthetic construct
  source 1..15: mol_type = other DNA
aggagttcccttcca

SEQ ID NO: 1876 - DNA, 15 bp, synthetic construct
  source 1..15: mol_type = other DNA
agcagcttgtttgtc

SEQ ID NO: 1877 - DNA, 15 bp, synthetic construct
  source 1..15: mol_type = other DNA
tggcattatctgcat

SEQ ID NO: 1878 - DNA, 15 bp, synthetic construct
  source 1..15: mol_type = other DNA
gacacaaagccgtcc

SEQ ID NO: 1879 - DNA, 15 bp, synthetic construct
  source 1..15: mol_type = other DNA
caatgccttccagga

SEQ ID NO: 1880 - DNA, 15 bp, synthetic construct
  source 1..15: mol_type = other DNA
cccatgagcatgata

SEQ ID NO: 1881 - DNA, 15 bp, synthetic construct
  source 1..15: mol_type = other DNA
atgtggtctctgagt

SEQ ID NO: 1882 - DNA, 15 bp, synthetic construct
  source 1..15: mol_type = other DNA
tgtttgaggctccca

SEQ ID NO: 1883 - DNA, 15 bp, synthetic construct
  source 1..15: mol_type = other DNA
tttggttgacaatgc

SEQ ID NO: 1884 - DNA, 15 bp, synthetic construct
  source 1..15: mol_type = other DNA
atgtttctggacaca

SEQ ID NO: 1885 - DNA, 15 bp, synthetic construct
  source 1..15: mol_type = other DNA
tttgtcaagctgccc

SEQ ID NO: 1886 - DNA, 15 bp, synthetic construct
  source 1..15: mol_type = other DNA
ttttgttcactaggc

SEQ ID NO: 1887 - DNA, 15 bp, synthetic construct
  source 1..15: mol_type = other DNA
ggagcactcaagtgt

SEQ ID NO: 1888 - DNA, 15 bp, synthetic construct
  source 1..15: mol_type = other DNA
gctccaaagctgtct

SEQ ID NO: 1889 - DNA, 15 bp, synthetic construct
  source 1..15: mol_type = other DNA
tggagtatcacggaa

SEQ ID NO: 1890 - DNA, 15 bp, synthetic construct
  source 1..15: mol_type = other DNA
tgcaatggaagcgtc

SEQ ID NO: 1891 - DNA, 15 bp, synthetic construct
  source 1..15: mol_type = other DNA
ttcttgaagtgcttc

SEQ ID NO: 1892 - DNA, 15 bp, synthetic construct
  source 1..15: mol_type = other DNA
tcaaagtaccacagc

SEQ ID NO: 1893 - DNA, 15 bp, synthetic construct
  source 1..15: mol_type = other DNA
tggaatttccgaaga

SEQ ID NO: 1894 - DNA, 15 bp, synthetic construct
  source 1..15: mol_type = other DNA
gccggtgtagatctg

SEQ ID NO: 1895 - DNA, 15 bp, synthetic construct
  source 1..15: mol_type = other DNA
tcttcacccattttt

SEQ ID NO: 1896 - DNA, 15 bp, synthetic construct
  source 1..15: mol_type = other DNA
gcctccattcaccag

SEQ ID NO: 1897 - DNA, 15 bp, synthetic construct
  source 1..15: mol_type = other DNA
cacagttgtgggaga

SEQ ID NO: 1898 - DNA, 15 bp, synthetic construct
  source 1..15: mol_type = other DNA
tggcatagaataaga

SEQ ID NO: 1899 - DNA, 15 bp, synthetic construct
  source 1..15: mol_type = other DNA
gtgatggtcggcaac

SEQ ID NO: 1900 - DNA, 15 bp, synthetic construct
  source 1..15: mol_type = other DNA
tgctaagaagtaagt

SEQ ID NO: 1901 - DNA, 15 bp, synthetic construct
  source 1..15: mol_type = other DNA
gccacagttgtgggt

SEQ ID NO: 1902 - DNA, 15 bp, synthetic construct
  source 1..15: mol_type = other DNA
tgggctggaaaagtc

SEQ ID NO: 1903 - DNA, 15 bp, synthetic construct
  source 1..15: mol_type = other DNA
ggcatcattggtgtc

SEQ ID NO: 1904 - DNA, 15 bp, synthetic construct
  source 1..15: mol_type = other DNA
actcattccctgagc

SEQ ID NO: 1905 - DNA, 15 bp, synthetic construct
  source 1..15: mol_type = other DNA
ccaggtggaaatgac

SEQ ID NO: 1906 - DNA, 15 bp, synthetic construct
  source 1..15: mol_type = other DNA
cacagttgtgggaga

SEQ ID NO: 1907 - DNA, 15 bp, synthetic construct
  source 1..15: mol_type = other DNA
ccagagagtggattc

SEQ ID NO: 1908 - DNA, 15 bp, synthetic construct
  source 1..15: mol_type = other DNA
caatgatccatcaaa

SEQ ID NO: 1909 - DNA, 15 bp, synthetic construct
  source 1..15: mol_type = other DNA
gtgtgtcctctaggg

SEQ ID NO: 1910 - DNA, 15 bp, synthetic construct
  source 1..15: mol_type = other DNA
tcattggtgtcccag

SEQ ID NO: 1911 - DNA, 15 bp, synthetic construct
  source 1..15: mol_type = other DNA
tggcatcattggtgt

SEQ ID NO: 1912 - DNA, 15 bp, synthetic construct
  source 1..15: mol_type = other DNA
tcagcctgaacgtac

SEQ ID NO: 1913 - DNA, 15 bp, synthetic construct
  source 1..15: mol_type = other DNA
acctctactcggccc

SEQ ID NO: 1914 - DNA, 15 bp, synthetic construct
  source 1..15: mol_type = other DNA
agcgcacatcatcca

SEQ ID NO: 1915 - DNA, 15 bp, synthetic construct
  source 1..15: mol_type = other DNA
ttgtgaatatcacca

SEQ ID NO: 1916 - DNA, 15 bp, synthetic construct
  source 1..15: mol_type = other DNA
gtcctgaaccctggc

SEQ ID NO: 1917 - DNA, 15 bp, synthetic construct
  source 1..15: mol_type = other DNA
gccatcgaaaacttc

SEQ ID NO: 1918 - DNA, 15 bp, synthetic construct
  source 1..15: mol_type = other DNA
atgactgtggagatc

SEQ ID NO: 1919 - DNA, 15 bp, synthetic construct
  source 1..15: mol_type = other DNA
tcatgtcctgagcag

SEQ ID NO: 1920 - DNA, 15 bp, synthetic construct
  source 1..15: mol_type = other DNA
gtatccgtggaccca

SEQ ID NO: 1921 - DNA, 15 bp, synthetic construct
  source 1..15: mol_type = other DNA
taaggagggagtgtg

SEQ ID NO: 1922 - DNA, 15 bp, synthetic construct
  source 1..15: mol_type = other DNA
gagaacctgagctgc

SEQ ID NO: 1923 - DNA, 15 bp, synthetic construct
  source 1..15: mol_type = other DNA
cctaccaaaacttca

SEQ ID NO: 1924 - DNA, 15 bp, synthetic construct
  source 1..15: mol_type = other DNA
ccgagcatggagaag

SEQ ID NO: 1925 - DNA, 15 bp, synthetic construct
  source 1..15: mol_type = other DNA
aggagacgtctcaga

SEQ ID NO: 1926 - DNA, 15 bp, synthetic construct
  source 1..15: mol_type = other DNA
caaggagagacaagc

SEQ ID NO: 1927 - DNA, 15 bp, synthetic construct
  source 1..15: mol_type = other DNA
attatgggtctttct

SEQ ID NO: 1928 - DNA, 15 bp, synthetic construct
  source 1..15: mol_type = other DNA
tcaccattgctgcca

SEQ ID NO: 1929 - DNA, 15 bp, synthetic construct
  source 1..15: mol_type = other DNA
gcctcggtggtggtt

SEQ ID NO: 1930 - DNA, 15 bp, synthetic construct
  source 1..15: mol_type = other DNA
cttcatgtcgctgcc

SEQ ID NO: 1931 - DNA, 15 bp, synthetic construct
  source 1..15: mol_type = other DNA
agtgatgacgcgtcc

SEQ ID NO: 1932 - DNA, 15 bp, synthetic construct
  source 1..15: mol_type = other DNA
cacgggatgcgagag

SEQ ID NO: 1933 - DNA, 15 bp, synthetic construct
  source 1..15: mol_type = other DNA
accaacagcgtcacc

SEQ ID NO: 1934 - DNA, 15 bp, synthetic construct
  source 1..15: mol_type = other DNA
ggtcaccaaagggag

SEQ ID NO: 1935 - DNA, 15 bp, synthetic construct
  source 1..15: mol_type = other DNA
gggacccagtcgttc

SEQ ID NO: 1936 - DNA, 15 bp, synthetic construct
  source 1..15: mol_type = other DNA
tgaggaaaggagtgt

SEQ ID NO: 1937 - DNA, 15 bp, synthetic construct
  source 1..15: mol_type = other DNA
caccataggcagtgg

SEQ ID NO: 1938 - DNA, 15 bp, synthetic construct
  source 1..15: mol_type = other DNA
ctgtctgccaatctc

SEQ ID NO: 1939 - DNA, 15 bp, synthetic construct
  source 1..15: mol_type = other DNA
ctggttgtaattgta

SEQ ID NO: 1940 - DNA, 15 bp, synthetic construct
  source 1..15: mol_type = other DNA
aagtttggtggccct

SEQ ID NO: 1941 - DNA, 15 bp, synthetic construct
  source 1..15: mol_type = other DNA
gctctcactgaacca

SEQ ID NO: 1942 - DNA, 15 bp, synthetic construct
  source 1..15: mol_type = other DNA
ctggaacctgcctga

SEQ ID NO: 1943 - DNA, 15 bp, synthetic construct
  source 1..15: mol_type = other DNA
tgtatgtgacgaggc

SEQ ID NO: 1944 - DNA, 15 bp, synthetic construct
  source 1..15: mol_type = other DNA
atcgccatactggcc

SEQ ID NO: 1945 - DNA, 15 bp, synthetic construct
  source 1..15: mol_type = other DNA
tgcagaagaactcct

SEQ ID NO: 1946 - DNA, 15 bp, synthetic construct
  source 1..15: mol_type = other DNA
tgccggttcaaattc

SEQ ID NO: 1947 - DNA, 15 bp, synthetic construct
  source 1..15: mol_type = other DNA
ttcccagttcaacct

SEQ ID NO: 1948 - DNA, 15 bp, synthetic construct
  source 1..15: mol_type = other DNA
tgtctgtcagaacct

SEQ ID NO: 1949 - DNA, 15 bp, synthetic construct
  source 1..15: mol_type = other DNA
gtttgccagtagctc

SEQ ID NO: 1950 - DNA, 15 bp, synthetic construct
  source 1..15: mol_type = other DNA
ggcagaagtacccag

SEQ ID NO: 1951 - DNA, 15 bp, synthetic construct
  source 1..15: mol_type = other DNA
tcctcacgggttccc

SEQ ID NO: 1952 - DNA, 15 bp, synthetic construct
  source 1..15: mol_type = other DNA
ggagcaggacatcac

SEQ ID NO: 1953 - DNA, 15 bp, synthetic construct
  source 1..15: mol_type = other DNA
tcccattctctgacc

SEQ ID NO: 1954 - DNA, 15 bp, synthetic construct
  source 1..15: mol_type = other DNA
aggcttctaggtgcc

SEQ ID NO: 1955 - DNA, 15 bp, synthetic construct
  source 1..15: mol_type = other DNA
ttctcacgcagttcc

SEQ ID NO: 1956 - DNA, 15 bp, synthetic construct
  source 1..15: mol_type = other DNA
ctgtgtggctagggt

SEQ ID NO: 1957 - DNA, 15 bp, synthetic construct
  source 1..15: mol_type = other DNA
ttgcgccagatatca

SEQ ID NO: 1958 - DNA, 15 bp, synthetic construct
  source 1..15: mol_type = other DNA
ttcttgattcctgga

SEQ ID NO: 1959 - DNA, 15 bp, synthetic construct
  source 1..15: mol_type = other DNA
tcgagtccttaggtc

SEQ ID NO: 1960 - DNA, 15 bp, synthetic construct
  source 1..15: mol_type = other DNA
tcactggagattttt

SEQ ID NO: 1961 - DNA, 15 bp, synthetic construct
  source 1..15: mol_type = other DNA
ctgtgcaaatcctga

SEQ ID NO: 1962 - DNA, 15 bp, synthetic construct
  source 1..15: mol_type = other DNA
ggatgattttctaga

SEQ ID NO: 1963 - DNA, 15 bp, synthetic construct
  source 1..15: mol_type = other DNA
ttgacactcgtccat

SEQ ID NO: 1964 - DNA, 15 bp, synthetic construct
  source 1..15: mol_type = other DNA
ctgaactctgttggc

SEQ ID NO: 1965 - DNA, 15 bp, synthetic construct
  source 1..15: mol_type = other DNA
ttctcacattcaagt

SEQ ID NO: 1966 - DNA, 15 bp, synthetic construct
  source 1..15: mol_type = other DNA
tttgagtggacagtc

SEQ ID NO: 1967 - DNA, 15 bp, synthetic construct
  source 1..15: mol_type = other DNA
cttctttgtttggtg

SEQ ID NO: 1968 - DNA, 15 bp, synthetic construct
  source 1..15: mol_type = other DNA
atcacagtactccgc

SEQ ID NO: 1969 - DNA, 15 bp, synthetic construct
  source 1..15: mol_type = other DNA
cctcttcgatctcct

SEQ ID NO: 1970 - DNA, 15 bp, synthetic construct
  source 1..15: mol_type = other DNA
cccggtaggtcattg

SEQ ID NO: 1971 - DNA, 15 bp, synthetic construct
  source 1..15: mol_type = other DNA
ggactctggcagctg

SEQ ID NO: 1972 - DNA, 15 bp, synthetic construct
  source 1..15: mol_type = other DNA
accaggtagcattgt

SEQ ID NO: 1973 - DNA, 15 bp, synthetic construct
  source 1..15: mol_type = other DNA
ttagctttctgcaac

SEQ ID NO: 1974 - DNA, 15 bp, synthetic construct
  source 1..15: mol_type = other DNA
cccactcagtgcggt

SEQ ID NO: 1975 - DNA, 15 bp, synthetic construct
  source 1..15: mol_type = other DNA
gccaaagagtcagga

SEQ ID NO: 1976 - DNA, 15 bp, synthetic construct
  source 1..15: mol_type = other DNA
aagctctgatcgtag

SEQ ID NO: 1977 - DNA, 15 bp, synthetic construct
  source 1..15: mol_type = other DNA
gaatggcatctttta

SEQ ID NO: 1978 - DNA, 15 bp, synthetic construct
  source 1..15: mol_type = other DNA
tcttcacagttctct

SEQ ID NO: 1979 - DNA, 15 bp, synthetic construct
  source 1..15: mol_type = other DNA
ctttagatctagaag

SEQ ID NO: 1980 - DNA, 15 bp, synthetic construct
  source 1..15: mol_type = other DNA
cagctgtccatacag

SEQ ID NO: 1981 - DNA, 15 bp, synthetic construct
  source 1..15: mol_type = other DNA
actgtgttgagggca

SEQ ID NO: 1982 - DNA, 15 bp, synthetic construct
  source 1..15: mol_type = other DNA
aagactgctaaggca

SEQ ID NO: 1983 - DNA, 15 bp, synthetic construct
  source 1..15: mol_type = other DNA
gcaccaaagctgtat

SEQ ID NO: 1984 - DNA, 15 bp, synthetic construct
  source 1..15: mol_type = other DNA
ctgtcaccacataat

SEQ ID NO: 1985 - DNA, 15 bp, synthetic construct
  source 1..15: mol_type = other DNA
gcacactggatacag

SEQ ID NO: 1986 - DNA, 15 bp, synthetic construct
  source 1..15: mol_type = other DNA
gaggtcccaaacagt

SEQ ID NO: 1987 - DNA, 15 bp, synthetic construct
  source 1..15: mol_type = other DNA
ggcttcgtctcggaa

SEQ ID NO: 1988 - DNA, 15 bp, synthetic construct
  source 1..15: mol_type = other DNA
gcaagagacgcagtc

SEQ ID NO: 1989 - DNA, 15 bp, synthetic construct
  source 1..15: mol_type = other DNA
gaacatcctctggag

SEQ ID NO: 1990 - DNA, 15 bp, synthetic construct
  source 1..15: mol_type = other DNA
atgttatgttcaggc

SEQ ID NO: 1991 - DNA, 15 bp, synthetic construct
  source 1..15: mol_type = other DNA
gagcttgttactcgt

SEQ ID NO: 1992 - DNA, 15 bp, synthetic construct
  source 1..15: mol_type = other DNA
agggtgttgttttct

SEQ ID NO: 1993 - DNA, 15 bp, synthetic construct
  source 1..15: mol_type = other DNA
tggatcacacttttg

SEQ ID NO: 1994 - DNA, 15 bp, synthetic construct
  source 1..15: mol_type = other DNA
gtccacgcattccct

SEQ ID NO: 1995 - DNA, 15 bp, synthetic construct
  source 1..15: mol_type = other DNA
actgatggaggtgca

SEQ ID NO: 1996 - DNA, 15 bp, synthetic construct
  source 1..15: mol_type = other DNA
acttgcggacgccgt

SEQ ID NO: 1997 - DNA, 15 bp, synthetic construct
  source 1..15: mol_type = other DNA
atttccaaattccca

SEQ ID NO: 1998 - DNA, 15 bp, synthetic construct
  source 1..15: mol_type = other DNA
gactctgggtgaaca

SEQ ID NO: 1999 - DNA, 15 bp, synthetic construct
  source 1..15: mol_type = other DNA
aaggcaaacatcttt

SEQ ID NO: 2000 - DNA, 15 bp, synthetic construct
  source 1..15: mol_type = other DNA
tggagagctgatctt

SEQ ID NO: 2001 - DNA, 15 bp, synthetic construct
  source 1..15: mol_type = other DNA
gggttagtgtctccc

SEQ ID NO: 2002 - DNA, 15 bp, synthetic construct
  source 1..15: mol_type = other DNA
tgatcatctcagttt

SEQ ID NO: 2003 - DNA, 15 bp, synthetic construct
  source 1..15: mol_type = other DNA
taggagaatccgtgg

SEQ ID NO: 2004 - DNA, 15 bp, synthetic construct
  source 1..15: mol_type = other DNA
gacaaagggctccgg

SEQ ID NO: 2005 - DNA, 15 bp, synthetic construct
  source 1..15: mol_type = other DNA
atgggagcaatgtgc

SEQ ID NO: 2006 - DNA, 15 bp, synthetic construct
  source 1..15: mol_type = other DNA
ctgggtctttgaggg

SEQ ID NO: 2007 - DNA, 15 bp, synthetic construct
  source 1..15: mol_type = other DNA
aagcatcggtcaagt

SEQ ID NO: 2008 - DNA, 15 bp, synthetic construct
  source 1..15: mol_type = other DNA
cattgtagtgggcag

SEQ ID NO: 2009 - DNA, 15 bp, synthetic construct
  source 1..15: mol_type = other DNA
ttgcaaagcgcagac

SEQ ID NO: 2010 - DNA, 15 bp, synthetic construct
  source 1..15: mol_type = other DNA
agtcactgcaatgaa

SEQ ID NO: 2011 - DNA, 15 bp, synthetic construct
  source 1..15: mol_type = other DNA
tggacgctttgtcta

SEQ ID NO: 2012 - DNA, 15 bp, synthetic construct
  source 1..15: mol_type = other DNA
atactcctgaatcat

SEQ ID NO: 2013 - DNA, 15 bp, synthetic construct
  source 1..15: mol_type = other DNA
caggcaggttcactg

SEQ ID NO: 2014 - DNA, 15 bp, synthetic construct
  source 1..15: mol_type = other DNA
agaaggtgacttaga

SEQ ID NO: 2015 - DNA, 15 bp, synthetic construct
  source 1..15: mol_type = other DNA
gtggtatcaggtttt

SEQ ID NO: 2016 - DNA, 15 bp, synthetic construct
  source 1..15: mol_type = other DNA
ccttaacactcggct

SEQ ID NO: 2017 - DNA, 15 bp, synthetic construct
  source 1..15: mol_type = other DNA
ctttccggaaggaaa

SEQ ID NO: 2018 - DNA, 15 bp, synthetic construct
  source 1..15: mol_type = other DNA
aagcgccgtgagttg

SEQ ID NO: 2019 - DNA, 15 bp, synthetic construct
  source 1..15: mol_type = other DNA
gggttaaggaatcaa

SEQ ID NO: 2020 - DNA, 15 bp, synthetic construct
  source 1..15: mol_type = other DNA
gtagacgtgggcacg

SEQ ID NO: 2021 - DNA, 15 bp, synthetic construct
  source 1..15: mol_type = other DNA
gactagggcaaacat

SEQ ID NO: 2022 - DNA, 15 bp, synthetic construct
  source 1..15: mol_type = other DNA
gtgtacttccggatc

SEQ ID NO: 2023 - DNA, 15 bp, synthetic construct
  source 1..15: mol_type = other DNA
ggatcccaaagacca

SEQ ID NO: 2024 - DNA, 15 bp, synthetic construct
  source 1..15: mol_type = other DNA
cgtagaaaggtagtt

SEQ ID NO: 2025 - DNA, 15 bp, synthetic construct
  source 1..15: mol_type = other DNA
ggtgttatggtggat

SEQ ID NO: 2026 - DNA, 15 bp, synthetic construct
  source 1..15: mol_type = other DNA
caccgcagagatgat

SEQ ID NO: 2027 - DNA, 15 bp, synthetic construct
  source 1..15: mol_type = other DNA
actgagccattctgg

SEQ ID NO: 2028 - DNA, 15 bp, synthetic construct
  source 1..15: mol_type = other DNA
cctggcattcacata

SEQ ID NO: 2029 - DNA, 15 bp, synthetic construct
  source 1..15: mol_type = other DNA
cagatccaagcacct

SEQ ID NO: 2030 - DNA, 15 bp, synthetic construct
  source 1..15: mol_type = other DNA
agatgggcatgtagg

SEQ ID NO: 2031 - DNA, 15 bp, synthetic construct
  source 1..15: mol_type = other DNA
ctaggtgtcagcggc

SEQ ID NO: 2032 - DNA, 15 bp, synthetic construct
  source 1..15: mol_type = other DNA
gttctggaagacgct

SEQ ID NO: 2033 - DNA, 15 bp, synthetic construct
  source 1..15: mol_type = other DNA
cagaaatgccaggct

SEQ ID NO: 2034 - DNA, 15 bp, synthetic construct
  source 1..15: mol_type = other DNA
ccagcaaactcctgg

SEQ ID NO: 2035 - DNA, 15 bp, synthetic construct
  source 1..15: mol_type = other DNA
acaccgctgtgttcc

SEQ ID NO: 2036 - DNA, 15 bp, synthetic construct
  source 1..15: mol_type = other DNA
gctctgtctgttagt

SEQ ID NO: 2037 - DNA, 15 bp, synthetic construct
  source 1..15: mol_type = other DNA
ggcatagaggtcggt

SEQ ID NO: 2038 - DNA, 15 bp, synthetic construct
  source 1..15: mol_type = other DNA
gcaccgttgaaacaa

SEQ ID NO: 2039 - DNA, 15 bp, synthetic construct
  source 1..15: mol_type = other DNA
tgtttgaccgcgtcg

SEQ ID NO: 2040 - DNA, 15 bp, synthetic construct
  source 1..15: mol_type = other DNA
cacggtcgttatccc

SEQ ID NO: 2041 - DNA, 15 bp, synthetic construct
  source 1..15: mol_type = other DNA
caggaccgatagttg

SEQ ID NO: 2042 - DNA, 15 bp, synthetic construct
  source 1..15: mol_type = other DNA
taggctagcgaatct

SEQ ID NO: 2043 - DNA, 15 bp, synthetic construct
  source 1..15: mol_type = other DNA
agcatacggcttcca

SEQ ID NO: 2044 - DNA, 15 bp, synthetic construct
  source 1..15: mol_type = other DNA
ctaggcgcgacacta

SEQ ID NO: 2045 - DNA, 15 bp, synthetic construct
  source 1..15: mol_type = other DNA
gacacccgtaatcgt

SEQ ID NO: 2046 - DNA, 15 bp, synthetic construct
  source 1..15: mol_type = other DNA
ttcgcgtgtcatgac

SEQ ID NO: 2047 - DNA, 15 bp, synthetic construct
  source 1..15: mol_type = other DNA
ctcgttctcgtgtag

SEQ ID NO: 2048 - DNA, 15 bp, synthetic construct
  source 1..15: mol_type = other DNA
gatcttagcactcgt

SEQ ID NO: 2049 - DNA, 15 bp, synthetic construct
  source 1..15: mol_type = other DNA
gtaccctcggtctca

SEQ ID NO: 2050 - DNA, 15 bp, synthetic construct
  source 1..15: mol_type = other DNA
ccttccggagacttc

SEQ ID NO: 2051 - DNA, 15 bp, synthetic construct
  source 1..15: mol_type = other DNA
actagcgcctctggt

SEQ ID NO: 2052 - DNA, 15 bp, synthetic construct
  source 1..15: mol_type = other DNA
aatccgggatcgact

SEQ ID NO: 2053 - DNA, 15 bp, synthetic construct
  source 1..15: mol_type = other DNA
aatgttaacgcccga

SEQ ID NO: 2054 - DNA, 15 bp, synthetic construct
  source 1..15: mol_type = other DNA
ccgtctatacgcata

SEQ ID NO: 2055 - DNA, 15 bp, synthetic construct
  source 1..15: mol_type = other DNA
tctccgcgtgtgaca

SEQ ID NO: 2056 - DNA, 15 bp, synthetic construct
  source 1..15: mol_type = other DNA
atgtcgtggagtcct

SEQ ID NO: 2057 - DNA, 15 bp, synthetic construct
  source 1..15: mol_type = other DNA
ctacatctgcaggga

SEQ ID NO: 2058 - DNA, 15 bp, synthetic construct
  source 1..15: mol_type = other DNA
gcgtctcctaaatag

SEQ ID NO: 2059 - DNA, 15 bp, synthetic construct
  source 1..15: mol_type = other DNA
tgtctctctacacgc

SEQ ID NO: 2060 - DNA, 15 bp, synthetic construct
  source 1..15: mol_type = other DNA
gcggtagcaagtttc

SEQ ID NO: 2061 - DNA, 15 bp, synthetic construct
  source 1..15: mol_type = other DNA
cccgcatgctttccc

SEQ ID NO: 2062 - DNA, 15 bp, synthetic construct
  source 1..15: mol_type = other DNA
aataaggaccctctg

SEQ ID NO: 2063 - DNA, 15 bp, synthetic construct
  source 1..15: mol_type = other DNA
ttggccaacttcaag

SEQ ID NO: 2064 - DNA, 15 bp, synthetic construct
  source 1..15: mol_type = other DNA
acagtgttgagggca

SEQ ID NO: 2065 - DNA, 15 bp, synthetic construct
  source 1..15: mol_type = other DNA
atccaccatgcatca

SEQ ID NO: 2066 - DNA, 15 bp, synthetic construct
  source 1..15: mol_type = other DNA
actcactcacatccg

SEQ ID NO: 2067 - DNA, 15 bp, synthetic construct
  source 1..15: mol_type = other DNA
agctgtttgttactc

SEQ ID NO: 2068 - DNA, 15 bp, synthetic construct
  source 1..15: mol_type = other DNA
attgctccaggcggc

SEQ ID NO: 2069 - DNA, 15 bp, synthetic construct
  source 1..15: mol_type = other DNA
ccgggaactacatca

SEQ ID NO: 2070 - DNA, 15 bp, synthetic construct
  source 1..15: mol_type = other DNA
ttcagctttgcctag

SEQ ID NO: 2071 - DNA, 15 bp, synthetic construct
  source 1..15: mol_type = other DNA
agggataaagaaggt

SEQ ID NO: 2072 - DNA, 15 bp, synthetic construct
  source 1..15: mol_type = other DNA
taccaaggaagggct

SEQ ID NO: 2073 - DNA, 15 bp, synthetic construct
  source 1..15: mol_type = other DNA
tgggtaaaatacttc

SEQ ID NO: 2074 - DNA, 15 bp, synthetic construct
  source 1..15: mol_type = other DNA
cgtaagattacctaa

SEQ ID NO: 2075 - DNA, 15 bp, synthetic construct
  source 1..15: mol_type = other DNA
atatgggtagggaag

SEQ ID NO: 2076 - DNA, 15 bp, synthetic construct
  source 1..15: mol_type = other DNA
aattgttctgaccct

SEQ ID NO: 2077 - DNA, 15 bp, synthetic construct
  source 1..15: mol_type = other DNA
ccatctccagatgcc

SEQ ID NO: 2078 - DNA, 15 bp, synthetic construct
  source 1..15: mol_type = other DNA
taacacgctgctgcc

SEQ ID NO: 2079 - DNA, 15 bp, synthetic construct
  source 1..15: mol_type = other DNA
ctttgtctcagagcc

SEQ ID NO: 2080 - DNA, 15 bp, synthetic construct
  source 1..15: mol_type = other DNA
cccaagctgatgtca

SEQ ID NO: 2081 - DNA, 15 bp, synthetic construct
  source 1..15: mol_type = other DNA
atcccgaaggtgccg

SEQ ID NO: 2082 - DNA, 15 bp, synthetic construct
  source 1..15: mol_type = other DNA
cttgcactaacacat

SEQ ID NO: 2083 - DNA, 15 bp, synthetic construct
  source 1..15: mol_type = other DNA
caatcacgaaaatag

SEQ ID NO: 2084 - DNA, 15 bp, synthetic construct
  source 1..15: mol_type = other DNA
agatgatgtagccag

SEQ ID NO: 2085 - DNA, 15 bp, synthetic construct
  source 1..15: mol_type = other DNA
aggactcggtggata

SEQ ID NO: 2086 - DNA, 15 bp, synthetic construct
  source 1..15: mol_type = other DNA
ctgatgcagtagggc

SEQ ID NO: 2087 - DNA, 15 bp, synthetic construct
  source 1..15: mol_type = other DNA
aaactggcataatgt

SEQ ID NO: 2088 - DNA, 15 bp, synthetic construct
  source 1..15: mol_type = other DNA
atgagcgggcttggc

SEQ ID NO: 2089 - DNA, 15 bp, synthetic construct
  source 1..15: mol_type = other DNA
ggtcaaatccacaaa

SEQ ID NO: 2090 - DNA, 15 bp, synthetic construct
  source 1..15: mol_type = other DNA
gctcggagacacgct

SEQ ID NO: 2091 - DNA, 15 bp, synthetic construct
  source 1..15: mol_type = other DNA
aatgacctctctgtg

SEQ ID NO: 2092 - DNA, 15 bp, synthetic construct
  source 1..15: mol_type = other DNA
atagtcattgcacac

SEQ ID NO: 2093 - DNA, 15 bp, synthetic construct
  source 1..15: mol_type = other DNA
acagctctaaacaca

SEQ ID NO: 2094 - DNA, 15 bp, synthetic construct
  source 1..15: mol_type = other DNA
agactgcacttcctt

SEQ ID NO: 2095 - DNA, 15 bp, synthetic construct
  source 1..15: mol_type = other DNA
agagtatgtagtgca

SEQ ID NO: 2096 - DNA, 15 bp, synthetic construct
  source 1..15: mol_type = other DNA
ggagcaaacagtagc

SEQ ID NO: 2097 - DNA, 15 bp, synthetic construct
  source 1..15: mol_type = other DNA
cattttccctggttc

SEQ ID NO: 2098 - DNA, 15 bp, synthetic construct
  source 1..15: mol_type = other DNA
gtttcaacattctcc

SEQ ID NO: 2099 - DNA, 15 bp, synthetic construct
  source 1..15: mol_type = other DNA
catttacggagccgg

SEQ ID NO: 2100 - DNA, 15 bp, synthetic construct
  source 1..15: mol_type = other DNA
gccactcatctagaa

SEQ ID NO: 2101 - DNA, 15 bp, synthetic construct
  source 1..15: mol_type = other DNA
atcaggatctctagc

SEQ ID NO: 2102 - DNA, 15 bp, synthetic construct
  source 1..15: mol_type = other DNA
tgtcattggtactgg

SEQ ID NO: 2103 - DNA, 15 bp, synthetic construct
  source 1..15: mol_type = other DNA
gaaagccagaggcag

SEQ ID NO: 2104 - DNA, 15 bp, synthetic construct
  source 1..15: mol_type = other DNA
caatggtgcactggt

SEQ ID NO: 2105 - DNA, 15 bp, synthetic construct
  source 1..15: mol_type = other DNA
ccggagaatgtgaag

SEQ ID NO: 2106 - DNA, 15 bp, synthetic construct
  source 1..15: mol_type = other DNA
gtctggtaggatcat

SEQ ID NO: 2107 - DNA, 15 bp, synthetic construct
  source 1..15: mol_type = other DNA
agagctacgggaatc

SEQ ID NO: 2108 - DNA, 15 bp, synthetic construct
  source 1..15: mol_type = other DNA
atcactttggaccca

SEQ ID NO: 2109 - DNA, 15 bp, synthetic construct
  source 1..15: mol_type = other DNA
gaccatccaaaccag

SEQ ID NO: 2110 - DNA, 15 bp, synthetic construct
  source 1..15: mol_type = other DNA
cagatactgaccaca

SEQ ID NO: 2111 - DNA, 15 bp, synthetic construct
  source 1..15: mol_type = other DNA
aatccctcatccagc

SEQ ID NO: 2112 - DNA, 15 bp, synthetic construct
  source 1..15: mol_type = other DNA
ctccctcttcacgac

SEQ ID NO: 2113 - DNA, 15 bp, synthetic construct
  source 1..15: mol_type = other DNA
ggattagtgataatg

SEQ ID NO: 2114 - DNA, 15 bp, synthetic construct
  source 1..15: mol_type = other DNA
atgtcgccgttgagt

SEQ ID NO: 2115 - DNA, 15 bp, synthetic construct
  source 1..15: mol_type = other DNA
tcaaagggcgttggc

SEQ ID NO: 2116 - DNA, 15 bp, synthetic construct
  source 1..15: mol_type = other DNA
cccattctgcacgat

SEQ ID NO: 2117 - DNA, 15 bp, synthetic construct
  source 1..15: mol_type = other DNA
tctgcagttggtact

SEQ ID NO: 2118 - DNA, 15 bp, synthetic construct
  source 1..15: mol_type = other DNA
aggcatttatgaagc

SEQ ID NO: 2119 - DNA, 15 bp, synthetic construct
  source 1..15: mol_type = other DNA
tgactccctaaagca

SEQ ID NO: 2120 - DNA, 15 bp, synthetic construct
  source 1..15: mol_type = other DNA
cttctggatgagctc

SEQ ID NO: 2121 - DNA, 15 bp, synthetic construct
  source 1..15: mol_type = other DNA
gtcatcagggtgaaa

SEQ ID NO: 2122 - DNA, 15 bp, synthetic construct
  source 1..15: mol_type = other DNA
taattgtcctcctat

SEQ ID NO: 2123 - DNA, 15 bp, synthetic construct
  source 1..15: mol_type = other DNA
catggtctgaaagcc

SEQ ID NO: 2124 - DNA, 15 bp, synthetic construct
  source 1..15: mol_type = other DNA
aggatacatgtacat

SEQ ID NO: 2125 - DNA, 15 bp, synthetic construct
  source 1..15: mol_type = other DNA
gttcggtcacagact

SEQ ID NO: 2126 - DNA, 15 bp, synthetic construct
  source 1..15: mol_type = other DNA
gctgcttgatgggtt

SEQ ID NO: 2127 - DNA, 15 bp, synthetic construct
  source 1..15: mol_type = other DNA
agacaatgtcaccca

SEQ ID NO: 2128 - DNA, 15 bp, synthetic construct
  source 1..15: mol_type = other DNA
ggaaaggttggcaat

SEQ ID NO: 2129 - DNA, 15 bp, synthetic construct
  source 1..15: mol_type = other DNA
cacactctctctagt

SEQ ID NO: 2130 - DNA, 15 bp, synthetic construct
  source 1..15: mol_type = other DNA
tgaccatgaatggga

SEQ ID NO: 2131 - DNA, 15 bp, synthetic construct
  source 1..15: mol_type = other DNA
tgatgacagcgccct

SEQ ID NO: 2132 - DNA, 15 bp, synthetic construct
  source 1..15: mol_type = other DNA
ctttgttgggagacc

SEQ ID NO: 2133 - DNA, 15 bp, synthetic construct
  source 1..15: mol_type = other DNA
ggaggatagcttcca

SEQ ID NO: 2134 - DNA, 15 bp, synthetic construct
  source 1..15: mol_type = other DNA
catttcctcttacaa

SEQ ID NO: 2135 - DNA, 15 bp, synthetic construct
  source 1..15: mol_type = other DNA
tcttgccatcacagt

SEQ ID NO: 2136 - DNA, 15 bp, synthetic construct
  source 1..15: mol_type = other DNA
cgaccagcataaata

SEQ ID NO: 2137 - DNA, 15 bp, synthetic construct
  source 1..15: mol_type = other DNA
catttgaaaagacca

SEQ ID NO: 2138 - DNA, 15 bp, synthetic construct
  source 1..15: mol_type = other DNA
gaagatagtctacat

SEQ ID NO: 2139 - DNA, 15 bp, synthetic construct
  source 1..15: mol_type = other DNA
aacttgctgtgtaat

SEQ ID NO: 2140 - DNA, 15 bp, synthetic construct
  source 1..15: mol_type = other DNA
ttttgaaagtgcaca

SEQ ID NO: 2141 - DNA, 15 bp, synthetic construct
  source 1..15: mol_type = other DNA
tacgatttttaccca

SEQ ID NO: 2142 - DNA, 15 bp, synthetic construct
  source 1..15: mol_type = other DNA
ccagtgatgaaacgt

SEQ ID NO: 2143 - DNA, 15 bp, synthetic construct
  source 1..15: mol_type = other DNA
tgtgcattaaccaga

SEQ ID NO: 2144 - DNA, 15 bp, synthetic construct
  source 1..15: mol_type = other DNA
agacaatgcacatca

SEQ ID NO: 2145 - DNA, 15 bp, synthetic construct
  source 1..15: mol_type = other DNA
gtctgtgtactcctt

SEQ ID NO: 2146 - DNA, 15 bp, synthetic construct
  source 1..15: mol_type = other DNA
ccaatcccttggagt

SEQ ID NO: 2147 - DNA, 15 bp, synthetic construct
  source 1..15: mol_type = other DNA
cttgatgattccatg

SEQ ID NO: 2148 - DNA, 15 bp, synthetic construct
  source 1..15: mol_type = other DNA
ggtattctgggtccg

SEQ ID NO: 2149 - DNA, 15 bp, synthetic construct
  source 1..15: mol_type = other DNA
ttaacacttttggac

SEQ ID NO: 2150 - DNA, 15 bp, synthetic construct
  source 1..15: mol_type = other DNA
agtctcaactgtagt

SEQ ID NO: 2151 - DNA, 15 bp, synthetic construct
  source 1..15: mol_type = other DNA
ggccatcatgatgca

SEQ ID NO: 2152 - DNA, 15 bp, synthetic construct
  source 1..15: mol_type = other DNA
atacagtagagttac

SEQ ID NO: 2153 - DNA, 15 bp, synthetic construct
  source 1..15: mol_type = other DNA
ccattgactgtgcag

SEQ ID NO: 2154 - DNA, 15 bp, synthetic construct
  source 1..15: mol_type = other DNA
ccaagttagatctgg

SEQ ID NO: 2155 - DNA, 15 bp, synthetic construct
  source 1..15: mol_type = other DNA
tcatcaccaggtctc

SEQ ID NO: 2156 - DNA, 15 bp, synthetic construct
  source 1..15: mol_type = other DNA
tcaggaagatagcca

SEQ ID NO: 2157 - DNA, 15 bp, synthetic construct
  source 1..15: mol_type = other DNA
cggcaatcaccacct

SEQ ID NO: 2158 - DNA, 15 bp, synthetic construct
  source 1..15: mol_type = other DNA
catacctagcaggct

SEQ ID NO: 2159 - DNA, 15 bp, synthetic construct
  source 1..15: mol_type = other DNA
taggtgacttccagc

SEQ ID NO: 2160 - DNA, 15 bp, synthetic construct
  source 1..15: mol_type = other DNA
cgtgaccatgtccac

SEQ ID NO: 2161 - DNA, 15 bp, synthetic construct
  source 1..15: mol_type = other DNA
gctcgaaggatgtgt

SEQ ID NO: 2162 - DNA, 15 bp, synthetic construct
  source 1..15: mol_type = other DNA
gtgctgtagacgaca

SEQ ID NO: 2163 - DNA, 15 bp, synthetic construct
  source 1..15: mol_type = other DNA
cagttctgcggagcc

SEQ ID NO: 2164 - DNA, 15 bp, synthetic construct
  source 1..15: mol_type = other DNA
cggaagttgagggag

SEQ ID NO: 2165 - DNA, 15 bp, synthetic construct
  source 1..15: mol_type = other DNA
ccagaactcctgcaa

SEQ ID NO: 2166 - DNA, 15 bp, synthetic construct
  source 1..15: mol_type = other DNA
ggaggcatcaaacct

SEQ ID NO: 2167 - DNA, 15 bp, synthetic construct
  source 1..15: mol_type = other DNA
gccaatgtgcttccc

SEQ ID NO: 2168 - DNA, 15 bp, synthetic construct
  source 1..15: mol_type = other DNA
gcatccagtaggacc

SEQ ID NO: 2169 - DNA, 15 bp, synthetic construct
  source 1..15: mol_type = other DNA
tccaggaagcgaccg

SEQ ID NO: 2170 - DNA, 15 bp, synthetic construct
  source 1..15: mol_type = other DNA
actctcacactcgtc

SEQ ID NO: 2171 - DNA, 15 bp, synthetic construct
  source 1..15: mol_type = other DNA
aaccaaaatcccaac

SEQ ID NO: 2172 - DNA, 15 bp, synthetic construct
  source 1..15: mol_type = other DNA
tcctcgttgagatgg

SEQ ID NO: 2173 - DNA, 15 bp, synthetic construct
  source 1..15: mol_type = other DNA
aggtctcgttgatgg

SEQ ID NO: 2174 - DNA, 15 bp, synthetic construct
  source 1..15: mol_type = other DNA
agtcacacactcatc

SEQ ID NO: 2175 - DNA, 15 bp, synthetic construct
  source 1..15: mol_type = other DNA
gagagttcacgcagc

SEQ ID NO: 2176 - DNA, 15 bp, synthetic construct
  source 1..15: mol_type = other DNA
ctgacagataaaatc

SEQ ID NO: 2177 - DNA, 15 bp, synthetic construct
  source 1..15: mol_type = other DNA
gagactcgaggctgg

SEQ ID NO: 2178 - DNA, 15 bp, synthetic construct
  source 1..15: mol_type = other DNA
gctgtactcgcagct

SEQ ID NO: 2179 - DNA, 15 bp, synthetic construct
  source 1..15: mol_type = other DNA
gagcagatgtggccc

SEQ ID NO: 2180 - DNA, 15 bp, synthetic construct
  source 1..15: mol_type = other DNA
gcacgttcttctggc

SEQ ID NO: 2181 - DNA, 15 bp, synthetic construct
  source 1..15: mol_type = other DNA
tgttggcctaatgct

SEQ ID NO: 2182 - DNA, 15 bp, synthetic construct
  source 1..15: mol_type = other DNA
agctcatagccagtc

SEQ ID NO: 2183 - DNA, 15 bp, synthetic construct
  source 1..15: mol_type = other DNA
atgcccgatagggca

SEQ ID NO: 2184 - DNA, 15 bp, synthetic construct
  source 1..15: mol_type = other DNA
gatatgggtcctctt

SEQ ID NO: 2185 - DNA, 15 bp, synthetic construct
  source 1..15: mol_type = other DNA
tgccgagaaatccca

SEQ ID NO: 2186 - DNA, 15 bp, synthetic construct
  source 1..15: mol_type = other DNA
gtgtctcggcactgc

SEQ ID NO: 2187 - DNA, 15 bp, synthetic construct
  source 1..15: mol_type = other DNA
gagccgtagacgttg

SEQ ID NO: 2188 - DNA, 15 bp, synthetic construct
  source 1..15: mol_type = other DNA
catccacatcgctga

SEQ ID NO: 2189 - DNA, 15 bp, synthetic construct
  source 1..15: mol_type = other DNA
agcatatggcagcga

SEQ ID NO: 2190 - DNA, 15 bp, synthetic construct
  source 1..15: mol_type = other DNA
aacccgtcttgcatt

SEQ ID NO: 2191 - DNA, 15 bp, synthetic construct
  source 1..15: mol_type = other DNA
gattctccaagccgg

SEQ ID NO: 2192 - DNA, 15 bp, synthetic construct
  source 1..15: mol_type = other DNA
catcttgtataaagc

SEQ ID NO: 2193 - DNA, 15 bp, synthetic construct
  source 1..15: mol_type = other DNA
tgatcgggcttgagc

SEQ ID NO: 2194 - DNA, 15 bp, synthetic construct
  source 1..15: mol_type = other DNA
cgaaccctggttgtt

SEQ ID NO: 2195 - DNA, 15 bp, synthetic construct
  source 1..15: mol_type = other DNA
ggttatggactgtgg

SEQ ID NO: 2196 - DNA, 15 bp, synthetic construct
  source 1..15: mol_type = other DNA
acatcgcccatcaat

SEQ ID NO: 2197 - DNA, 15 bp, synthetic construct
  source 1..15: mol_type = other DNA
ctcccaggaattacc

SEQ ID NO: 2198 - DNA, 15 bp, synthetic construct
  source 1..15: mol_type = other DNA
actccattaatgcaa

SEQ ID NO: 2199 - DNA, 15 bp, synthetic construct
  source 1..15: mol_type = other DNA
cacaggaatgccggc

SEQ ID NO: 2200 - DNA, 15 bp, synthetic construct
  source 1..15: mol_type = other DNA
cacaggtatgcagaa

SEQ ID NO: 2201 - DNA, 15 bp, synthetic construct
  source 1..15: mol_type = other DNA
ttataacgtgatcca

SEQ ID NO: 2202 - DNA, 15 bp, synthetic construct
  source 1..15: mol_type = other DNA
agtgcatgcacatcg

SEQ ID NO: 2203 - DNA, 15 bp, synthetic construct
  source 1..15: mol_type = other DNA
cgtccattttgacag

SEQ ID NO: 2204 - DNA, 15 bp, synthetic construct
  source 1..15: mol_type = other DNA
gtgcagacaatcccg

SEQ ID NO: 2205 - DNA, 15 bp, synthetic construct
  source 1..15: mol_type = other DNA
aggtaaggttttcca

SEQ ID NO: 2206 - DNA, 15 bp, synthetic construct
  source 1..15: mol_type = other DNA
tcatgcagatcccag

SEQ ID NO: 2207 - DNA, 15 bp, synthetic construct
  source 1..15: mol_type = other DNA
aaaagacccaacagt

SEQ ID NO: 2208 - DNA, 15 bp, synthetic construct
  source 1..15: mol_type = other DNA
gcacttgccgtgggt

SEQ ID NO: 2209 - DNA, 15 bp, synthetic construct
  source 1..15: mol_type = other DNA
gagaggtgtaaaaac

SEQ ID NO: 2210 - DNA, 15 bp, synthetic construct
  source 1..15: mol_type = other DNA
tttcacagattccat

SEQ ID NO: 2211 - DNA, 15 bp, synthetic construct
  source 1..15: mol_type = other DNA
aggagactgttcagt

SEQ ID NO: 2212 - DNA, 15 bp, synthetic construct
  source 1..15: mol_type = other DNA
gtggcatccaaagtc

SEQ ID NO: 2213 - DNA, 15 bp, synthetic construct
  source 1..15: mol_type = other DNA
gatttagtgacagca

SEQ ID NO: 2214 - DNA, 15 bp, synthetic construct
  source 1..15: mol_type = other DNA
tatgctgcattcatc

SEQ ID NO: 2215 - DNA, 15 bp, synthetic construct
  source 1..15: mol_type = other DNA
tacagcgaatattgc

SEQ ID NO: 2216 - DNA, 15 bp, synthetic construct
  source 1..15: mol_type = other DNA
gttgatgcagcgtcc

SEQ ID NO: 2217 - DNA, 15 bp, synthetic construct
  source 1..15: mol_type = other DNA
ggacactcctcgcat

SEQ ID NO: 2218 - DNA, 15 bp, synthetic construct
  source 1..15: mol_type = other DNA
acgaatggcctggca

SEQ ID NO: 2219 - DNA, 15 bp, synthetic construct
  source 1..15: mol_type = other DNA
atcctatattggcac

SEQ ID NO: 2220 - DNA, 15 bp, synthetic construct
  source 1..15: mol_type = other DNA
tcgtgcaaaggtcaa

SEQ ID NO: 2221 - DNA, 15 bp, synthetic construct
  source 1..15: mol_type = other DNA
aacatgcatctggcc

SEQ ID NO: 2222 - DNA, 15 bp, synthetic construct
  source 1..15: mol_type = other DNA
taatcttggtggatg

SEQ ID NO: 2223 - DNA, 15 bp, synthetic construct
  source 1..15: mol_type = other DNA
tggcagatatgaaag

SEQ ID NO: 2224 - DNA, 15 bp, synthetic construct
  source 1..15: mol_type = other DNA
ggaaatattctctcc

SEQ ID NO: 2225 - DNA, 15 bp, synthetic construct
  source 1..15: mol_type = other DNA
tcatattcctgcccg

SEQ ID NO: 2226 - DNA, 15 bp, synthetic construct
  source 1..15: mol_type = other DNA
ggcagagaaagttct

SEQ ID NO: 2227 - DNA, 15 bp, synthetic construct
  source 1..15: mol_type = other DNA
cgtggagttttttat

SEQ ID NO: 2228 - DNA, 15 bp, synthetic construct
  source 1..15: mol_type = other DNA
gctttgtcggactcc

SEQ ID NO: 2229 - DNA, 15 bp, synthetic construct
  source 1..15: mol_type = other DNA
acaccagaacaaggt

SEQ ID NO: 2230 - DNA, 15 bp, synthetic construct
  source 1..15: mol_type = other DNA
cccgatctgcagaga

SEQ ID NO: 2231 - DNA, 15 bp, synthetic construct
  source 1..15: mol_type = other DNA
atgacgaactcagga

SEQ ID NO: 2232 - DNA, 15 bp, synthetic construct
  source 1..15: mol_type = other DNA
ctgttctccacagac

SEQ ID NO: 2233 - DNA, 15 bp, synthetic construct
  source 1..15: mol_type = other DNA
ggtgggtgcaaatcg

SEQ ID NO: 2234 - DNA, 15 bp, synthetic construct
  source 1..15: mol_type = other DNA
caatgcacattagca

SEQ ID NO: 2235 - DNA, 15 bp, synthetic construct
  source 1..15: mol_type = other DNA
ttcaaccagtatggc

SEQ ID NO: 2236 - DNA, 15 bp, synthetic construct
  source 1..15: mol_type = other DNA
gtgaaagcggaaagt

SEQ ID NO: 2237 - DNA, 15 bp, synthetic construct
  source 1..15: mol_type = other DNA
ctgtgaccacaagct

SEQ ID NO: 2238 - DNA, 15 bp, synthetic construct
  source 1..15: mol_type = other DNA
ctgagacattgaggt

SEQ ID NO: 2239 - DNA, 15 bp, synthetic construct
  source 1..15: mol_type = other DNA
acatctgccgaggct

SEQ ID NO: 2240 - DNA, 15 bp, synthetic construct
  source 1..15: mol_type = other DNA
gtccatcgtgctgac

SEQ ID NO: 2241 - DNA, 15 bp, synthetic construct
  source 1..15: mol_type = other DNA
tttcctcttggaaca

SEQ ID NO: 2242 - DNA, 15 bp, synthetic construct
  source 1..15: mol_type = other DNA
gaaccacatgttgtc

SEQ ID NO: 2243 - DNA, 15 bp, synthetic construct
  source 1..15: mol_type = other DNA
ttggtaactggaggc

SEQ ID NO: 2244 - DNA, 15 bp, synthetic construct
  source 1..15: mol_type = other DNA
ccactgtgtagagct

SEQ ID NO: 2245 - DNA, 15 bp, synthetic construct
  source 1..15: mol_type = other DNA
acgcatgacacctca

SEQ ID NO: 2246 - DNA, 15 bp, synthetic construct
  source 1..15: mol_type = other DNA
ctttgtttcacagct

SEQ ID NO: 2247 - DNA, 15 bp, synthetic construct
  source 1..15: mol_type = other DNA
tccaaagagatttct

SEQ ID NO: 2248 - DNA, 15 bp, synthetic construct
  source 1..15: mol_type = other DNA
gacacacagttctgg

SEQ ID NO: 2249 - DNA, 15 bp, synthetic construct
  source 1..15: mol_type = other DNA
ggctgcgcttaagga

SEQ ID NO: 2250 - DNA, 15 bp, synthetic construct
  source 1..15: mol_type = other DNA
ccgtgaagactctgc

SEQ ID NO: 2251 - DNA, 15 bp, synthetic construct
  source 1..15: mol_type = other DNA
tttgtacgcagtgct

SEQ ID NO: 2252 - DNA, 15 bp, synthetic construct
  source 1..15: mol_type = other DNA
gtcacttcgccctga

SEQ ID NO: 2253 - DNA, 15 bp, synthetic construct
  source 1..15: mol_type = other DNA
gtgccattgtgactt

SEQ ID NO: 2254 - DNA, 15 bp, synthetic construct
  source 1..15: mol_type = other DNA
aggatgtgttcctgc

SEQ ID NO: 2255 - DNA, 15 bp, synthetic construct
  source 1..15: mol_type = other DNA
agaacagtgttcact

SEQ ID NO: 2256 - DNA, 15 bp, synthetic construct
  source 1..15: mol_type = other DNA
ctgctgatgtgtagc

SEQ ID NO: 2257 - DNA, 15 bp, synthetic construct
  source 1..15: mol_type = other DNA
agagtcttctcttct

SEQ ID NO: 2258 - DNA, 15 bp, synthetic construct
  source 1..15: mol_type = other DNA
cttgaaggctggaaa

SEQ ID NO: 2259 - DNA, 15 bp, synthetic construct
  source 1..15: mol_type = other DNA
agaggttctgctggt

SEQ ID NO: 2260 - DNA, 15 bp, synthetic construct
  source 1..15: mol_type = other DNA
ttccagtggaaaaac

SEQ ID NO: 2261 - DNA, 15 bp, synthetic construct
  source 1..15: mol_type = other DNA
gtcattgacactggc

SEQ ID NO: 2262 - DNA, 15 bp, synthetic construct
  source 1..15: mol_type = other DNA
gtcctgcggatttag

SEQ ID NO: 2263 - DNA, 15 bp, synthetic construct
  source 1..15: mol_type = other DNA
tgagtgatggtgatg

SEQ ID NO: 2264 - DNA, 15 bp, synthetic construct
  source 1..15: mol_type = other DNA
caccgtgggtgtgat

SEQ ID NO: 2265 - DNA, 15 bp, synthetic construct
  source 1..15: mol_type = other DNA
tcctggactacctgc

SEQ ID NO: 2266 - DNA, 15 bp, synthetic construct
  source 1..15: mol_type = other DNA
ccctgcagaagtagg

SEQ ID NO: 2267 - DNA, 15 bp, synthetic construct
  source 1..15: mol_type = other DNA
tcttactaccctggc

SEQ ID NO: 2268 - DNA, 15 bp, synthetic construct
  source 1..15: mol_type = other DNA
atagaagttctgtga

SEQ ID NO: 2269 - DNA, 15 bp, synthetic construct
  source 1..15: mol_type = other DNA
gacacagggtttgtt

SEQ ID NO: 2270 - DNA, 15 bp, synthetic construct
  source 1..15: mol_type = other DNA
ttcacagtctctgaa

SEQ ID NO: 2271 - DNA, 15 bp, synthetic construct
  source 1..15: mol_type = other DNA
ttgctgcctttctac

SEQ ID NO: 2272 - DNA, 15 bp, synthetic construct
  source 1..15: mol_type = other DNA
aattccactacggct

SEQ ID NO: 2273 - DNA, 15 bp, synthetic construct
  source 1..15: mol_type = other DNA
tgaaacagagctgca

SEQ ID NO: 2274 - DNA, 15 bp, synthetic construct
  source 1..15: mol_type = other DNA
gagatgtgacaggga

SEQ ID NO: 2275 - DNA, 15 bp, synthetic construct
  source 1..15: mol_type = other DNA
agaattgtttagcac

SEQ ID NO: 2276 - DNA, 15 bp, synthetic construct
  source 1..15: mol_type = other DNA
ttggttctttcttct

SEQ ID NO: 2277 - DNA, 15 bp, synthetic construct
  source 1..15: mol_type = other DNA
ctctggtcagatggt

SEQ ID NO: 2278 - DNA, 15 bp, synthetic construct
  source 1..15: mol_type = other DNA
gaagtctggcaaggg

SEQ ID NO: 2279 - DNA, 15 bp, synthetic construct
  source 1..15: mol_type = other DNA
gacatctgggacagg

SEQ ID NO: 2280 - DNA, 15 bp, synthetic construct
  source 1..15: mol_type = other DNA
gggacagaaaaagtg

SEQ ID NO: 2281 - DNA, 15 bp, synthetic construct
  source 1..15: mol_type = other DNA
catcttggcttgtcc

SEQ ID NO: 2282 - DNA, 15 bp, synthetic construct
  source 1..15: mol_type = other DNA
ccagatccactcatt

SEQ ID NO: 2283 - DNA, 15 bp, synthetic construct
  source 1..15: mol_type = other DNA
gcagaaagagacttg

SEQ ID NO: 2284 - DNA, 15 bp, synthetic construct
  source 1..15: mol_type = other DNA
gagtctcattcgtag

SEQ ID NO: 2285 - DNA, 15 bp, synthetic construct
  source 1..15: mol_type = other DNA
tagagctctgattct

SEQ ID NO: 2286 - DNA, 15 bp, synthetic construct
  source 1..15: mol_type = other DNA
ggtgcgacaatattc

SEQ ID NO: 2287 - DNA, 15 bp, synthetic construct
  source 1..15: mol_type = other DNA
tactttgtctccttt

SEQ ID NO: 2288 - DNA, 15 bp, synthetic construct
  source 1..15: mol_type = other DNA
tttgttggcttcatt

SEQ ID NO: 2289 - DNA, 15 bp, synthetic construct
  source 1..15: mol_type = other DNA
ccagtagtatctgcc

SEQ ID NO: 2290 - DNA, 15 bp, synthetic construct
  source 1..15: mol_type = other DNA
tgaatcactgtccat

SEQ ID NO: 2291 - DNA, 15 bp, synthetic construct
  source 1..15: mol_type = other DNA
ttcccatctgtgttg

SEQ ID NO: 2292 - DNA, 15 bp, synthetic construct
  source 1..15: mol_type = other DNA
cctcttttgccacag

SEQ ID NO: 2293 - DNA, 15 bp, synthetic construct
  source 1..15: mol_type = other DNA
tggtactgggaccat

SEQ ID NO: 2294 - DNA, 15 bp, synthetic construct
  source 1..15: mol_type = other DNA
ggttgaatgagatac

SEQ ID NO: 2295 - DNA, 15 bp, synthetic construct
  source 1..15: mol_type = other DNA
aggttagttgggata

SEQ ID NO: 2296 - DNA, 15 bp, synthetic construct
  source 1..15: mol_type = other DNA
acctccactgatggg

SEQ ID NO: 2297 - DNA, 15 bp, synthetic construct
  source 1..15: mol_type = other DNA
gacatctattatacc

SEQ ID NO: 2298 - DNA, 15 bp, synthetic construct
  source 1..15: mol_type = other DNA
cctcttgcaactgac

SEQ ID NO: 2299 - DNA, 15 bp, synthetic construct
  source 1..15: mol_type = other DNA
ggcactgaagaaacc

SEQ ID NO: 2300 - DNA, 15 bp, synthetic construct
  source 1..15: mol_type = other DNA
tgccgttgtgaatgg

SEQ ID NO: 2301 - DNA, 15 bp, synthetic construct
  source 1..15: mol_type = other DNA
caatagggctccagc

SEQ ID NO: 2302 - DNA, 15 bp, synthetic construct
  source 1..15: mol_type = other DNA
gggacttaactagaa

SEQ ID NO: 2303 - DNA, 15 bp, synthetic construct
  source 1..15: mol_type = other DNA
cttccacattgttat

SEQ ID NO: 2304 - DNA, 15 bp, synthetic construct
  source 1..15: mol_type = other DNA
tgttcctctgtattt

SEQ ID NO: 2305 - DNA, 15 bp, synthetic construct
  source 1..15: mol_type = other DNA
aggaatccgggaatg

SEQ ID NO: 2306 - DNA, 15 bp, synthetic construct
  source 1..15: mol_type = other DNA
ttcctgccaaagtca

SEQ ID NO: 2307 - DNA, 15 bp, synthetic construct
  source 1..15: mol_type = other DNA
gcagctgctttggct

SEQ ID NO: 2308 - DNA, 15 bp, synthetic construct
  source 1..15: mol_type = other DNA
accatccttttcatg

SEQ ID NO: 2309 - DNA, 15 bp, synthetic construct
  source 1..15: mol_type = other DNA
gtgttgagatgatat

SEQ ID NO: 2310 - DNA, 15 bp, synthetic construct
  source 1..15: mol_type = other DNA
tgtgcttcagccact

SEQ ID NO: 2311 - DNA, 15 bp, synthetic construct
  source 1..15: mol_type = other DNA
cctctgcacgtacta

SEQ ID NO: 2312 - DNA, 15 bp, synthetic construct
  source 1..15: mol_type = other DNA
gatgagcttgacttg

SEQ ID NO: 2313 - DNA, 15 bp, synthetic construct
  source 1..15: mol_type = other DNA
gagcactgtgtcagg

SEQ ID NO: 2314 - DNA, 15 bp, synthetic construct
  source 1..15: mol_type = other DNA
caggacgatcatgga

SEQ ID NO: 2315 - DNA, 15 bp, synthetic construct
  source 1..15: mol_type = other DNA
acccggtcaaacaag

SEQ ID NO: 2316 - DNA, 15 bp, synthetic construct
  source 1..15: mol_type = other DNA
gtcgagtcacccatg

SEQ ID NO: 2317 - DNA, 15 bp, synthetic construct
  source 1..15: mol_type = other DNA
tgacatttgggccat

SEQ ID NO: 2318 - DNA, 15 bp, synthetic construct
  source 1..15: mol_type = other DNA
atagcggatgctgcc

SEQ ID NO: 2319 - DNA, 15 bp, synthetic construct
  source 1..15: mol_type = other DNA
ggatgatgtccgtat

SEQ ID NO: 2320 - DNA, 15 bp, synthetic construct
  source 1..15: mol_type = other DNA
ggcttccagcttctc

SEQ ID NO: 2321 - DNA, 15 bp, synthetic construct
  source 1..15: mol_type = other DNA
ggacgatcatggagc

SEQ ID NO: 2322 - DNA, 15 bp, synthetic construct
  source 1..15: mol_type = other DNA
attgtcctcagtcac

SEQ ID NO: 2323 - DNA, 15 bp, synthetic construct
  source 1..15: mol_type = other DNA
gatcagcttcatcac

SEQ ID NO: 2324 - DNA, 15 bp, synthetic construct
  source 1..15: mol_type = other DNA
cacttccagtccatc

SEQ ID NO: 2325 - DNA, 15 bp, synthetic construct
  source 1..15: mol_type = other DNA
gggactaagcgccaa

SEQ ID NO: 2326 - DNA, 15 bp, synthetic construct
  source 1..15: mol_type = other DNA
gaaaccgtcggctcc

SEQ ID NO: 2327 - DNA, 15 bp, synthetic construct
  source 1..15: mol_type = other DNA
agtgctgatggcgca

SEQ ID NO: 2328 - DNA, 15 bp, synthetic construct
  source 1..15: mol_type = other DNA
gagacttggttctgc

SEQ ID NO: 2329 - DNA, 15 bp, synthetic construct
  source 1..15: mol_type = other DNA
ccgcaggtactgcat

SEQ ID NO: 2330 - DNA, 15 bp, synthetic construct
  source 1..15: mol_type = other DNA
ccatgaaaggcctgt

SEQ ID NO: 2331 - DNA, 15 bp, synthetic construct
  source 1..15: mol_type = other DNA
tcgagaggtagatct

SEQ ID NO: 2332 - DNA, 15 bp, synthetic construct
  source 1..15: mol_type = other DNA
cccgacaatcccacc

SEQ ID NO: 2333 - DNA, 15 bp, synthetic construct
  source 1..15: mol_type = other DNA
ttcgactctgatggt

SEQ ID NO: 2334 - DNA, 15 bp, synthetic construct
  source 1..15: mol_type = other DNA
taacacccgggcatc

SEQ ID NO: 2335 - DNA, 15 bp, synthetic construct
  source 1..15: mol_type = other DNA
gttcttcatctggat

SEQ ID NO: 2336 - DNA, 15 bp, synthetic construct
  source 1..15: mol_type = other DNA
tttgaccttctgagg

SEQ ID NO: 2337 - DNA, 15 bp, synthetic construct
  source 1..15: mol_type = other DNA
gttctggttaaagtt

SEQ ID NO: 2338 - DNA, 15 bp, synthetic construct
  source 1..15: mol_type = other DNA
actgtaaagtcggtg

SEQ ID NO: 2339 - DNA, 15 bp, synthetic construct
  source 1..15: mol_type = other DNA
atccttaggatccac

SEQ ID NO: 2340 - DNA, 15 bp, synthetic construct
  source 1..15: mol_type = other DNA
tggtcaacgtgtaca

SEQ ID NO: 2341 - DNA, 15 bp, synthetic construct
  source 1..15: mol_type = other DNA
ttcaggagtgatgac

SEQ ID NO: 2342 - DNA, 15 bp, synthetic construct
  source 1..15: mol_type = other DNA
tcacgtctccttgcc

SEQ ID NO: 2343 - DNA, 15 bp, synthetic construct
  source 1..15: mol_type = other DNA
caggcttctgcgggt

SEQ ID NO: 2344 - DNA, 15 bp, synthetic construct
  source 1..15: mol_type = other DNA
cctttgggttgtagg

SEQ ID NO: 2345 - DNA, 15 bp, synthetic construct
  source 1..15: mol_type = other DNA
aggcctctttcaatc

SEQ ID NO: 2346 - DNA, 15 bp, synthetic construct
  source 1..15: mol_type = other DNA
ctctgaaagggctgg

SEQ ID NO: 2347 - DNA, 15 bp, synthetic construct
  source 1..15: mol_type = other DNA
tgtccttgatgtctt

SEQ ID NO: 2348 - DNA, 15 bp, synthetic construct
  source 1..15: mol_type = other DNA
cgtaagtcaccagaa

SEQ ID NO: 2349 - DNA, 15 bp, synthetic construct
  source 1..15: mol_type = other DNA
ttgtcactgtcaggg

SEQ ID NO: 2350 - DNA, 15 bp, synthetic construct
  source 1..15: mol_type = other DNA
tttaaccgtgtgaga

SEQ ID NO: 2351 - DNA, 15 bp, synthetic construct
  source 1..15: mol_type = other DNA
acacttccactgttg

SEQ ID NO: 2352 - DNA, 15 bp, synthetic construct
  source 1..15: mol_type = other DNA
tcctttgtcttccac

SEQ ID NO: 2353 - DNA, 15 bp, synthetic construct
  source 1..15: mol_type = other DNA
cgtctacagcataca

SEQ ID NO: 2354 - DNA, 15 bp, synthetic construct
  source 1..15: mol_type = other DNA
tcttggagatgtgct

SEQ ID NO: 2355 - DNA, 15 bp, synthetic construct
  source 1..15: mol_type = other DNA
catccagaaagtctt

SEQ ID NO: 2356 - DNA, 15 bp, synthetic construct
  source 1..15: mol_type = other DNA
ttgccaccgtaagtc

SEQ ID NO: 2357 - DNA, 15 bp, synthetic construct
  source 1..15: mol_type = other DNA
ctaccatcatccagc

SEQ ID NO: 2358 - DNA, 15 bp, synthetic construct
  source 1..15: mol_type = other DNA
atgtccttgtgtcct

SEQ ID NO: 2359 - DNA, 15 bp, synthetic construct
  source 1..15: mol_type = other DNA
cctcgagtctgaacc

SEQ ID NO: 2360 - DNA, 15 bp, synthetic construct
  source 1..15: mol_type = other DNA
tcaaactctgctccc

SEQ ID NO: 2361 - DNA, 15 bp, synthetic construct
  source 1..15: mol_type = other DNA
gttgaatgacaacag

SEQ ID NO: 2362 - DNA, 15 bp, synthetic construct
  source 1..15: mol_type = other DNA
attctactcctggag

SEQ ID NO: 2363 - DNA, 15 bp, synthetic construct
  source 1..15: mol_type = other DNA
actggtatctgacac

SEQ ID NO: 2364 - DNA, 15 bp, synthetic construct
  source 1..15: mol_type = other DNA
agtgtacttgtcaaa

SEQ ID NO: 2365 - DNA, 15 bp, synthetic construct
  source 1..15: mol_type = other DNA
gtgataaatacttcg

SEQ ID NO: 2366 - DNA, 15 bp, synthetic construct
  source 1..15: mol_type = other DNA
gccacgagggatacg

SEQ ID NO: 2367 - DNA, 15 bp, synthetic construct
  source 1..15: mol_type = other DNA
agctgcacgaacatc

SEQ ID NO: 2368 - DNA, 15 bp, synthetic construct
  source 1..15: mol_type = other DNA
tgtaaccaccagtct

SEQ ID NO: 2369 - DNA, 15 bp, synthetic construct
  source 1..15: mol_type = other DNA
gcgtccatgtgatca

SEQ ID NO: 2370 - DNA, 15 bp, synthetic construct
  source 1..15: mol_type = other DNA
gtttgttggtggaga

SEQ ID NO: 2371 - DNA, 15 bp, synthetic construct
  source 1..15: mol_type = other DNA
tcaaaagtgcaggag

SEQ ID NO: 2372 - DNA, 15 bp, synthetic construct
  source 1..15: mol_type = other DNA
cctggtatggtagct

SEQ ID NO: 2373 - DNA, 15 bp, synthetic construct
  source 1..15: mol_type = other DNA
cagttcagcatgtgc

SEQ ID NO: 2374 - DNA, 15 bp, synthetic construct
  source 1..15: mol_type = other DNA
ctgcactctcaggcg

SEQ ID NO: 2375 - DNA, 15 bp, synthetic construct
  source 1..15: mol_type = other DNA
aaaacctcggcttcc

SEQ ID NO: 2376 - DNA, 15 bp, synthetic construct
  source 1..15: mol_type = other DNA
attgaggtgtcatca

SEQ ID NO: 2377 - DNA, 15 bp, synthetic construct
  source 1..15: mol_type = other DNA
cattgcctaggtagg

SEQ ID NO: 2378 - DNA, 15 bp, synthetic construct
  source 1..15: mol_type = other DNA
catgtgacccatgtc

SEQ ID NO: 2379 - DNA, 15 bp, synthetic construct
  source 1..15: mol_type = other DNA
tcggtcacagattca

SEQ ID NO: 2380 - DNA, 15 bp, synthetic construct
  source 1..15: mol_type = other DNA
ctgttccagtcgctg

SEQ ID NO: 2381 - DNA, 15 bp, synthetic construct
  source 1..15: mol_type = other DNA
agtgcctgttcgtat

SEQ ID NO: 2382 - DNA, 15 bp, synthetic construct
  source 1..15: mol_type = other DNA
acgaagcagtcattg

SEQ ID NO: 2383 - DNA, 15 bp, synthetic construct
  source 1..15: mol_type = other DNA
ttgctgaccgggacg

SEQ ID NO: 2384 - DNA, 15 bp, synthetic construct
  source 1..15: mol_type = other DNA
ttcctaacatcctgg

SEQ ID NO: 2385 - DNA, 15 bp, synthetic construct
  source 1..15: mol_type = other DNA
ctatactaacaccat

SEQ ID NO: 2386 - DNA, 15 bp, synthetic construct
  source 1..15: mol_type = other DNA
ttctatcagccacag

SEQ ID NO: 2387 - DNA, 15 bp, synthetic construct
  source 1..15: mol_type = other DNA
gggtcaggtaaggag

SEQ ID NO: 2388 - DNA, 15 bp, synthetic construct
  source 1..15: mol_type = other DNA
aggaattgattccca

SEQ ID NO: 2389 - DNA, 15 bp, synthetic construct
  source 1..15: mol_type = other DNA
acttgtttcttcacc

SEQ ID NO: 2390 - DNA, 15 bp, synthetic construct
  source 1..15: mol_type = other DNA
cttgagaatgtatca

SEQ ID NO: 2391 - DNA, 15 bp, synthetic construct
  source 1..15: mol_type = other DNA
gacatgttgaaggac

SEQ ID NO: 2392 - DNA, 15 bp, synthetic construct
  source 1..15: mol_type = other DNA
tcgtagtcatggtgt

SEQ ID NO: 2393 - DNA, 15 bp, synthetic construct
  source 1..15: mol_type = other DNA
gggaaaggttgtgca

SEQ ID NO: 2394 - DNA, 15 bp, synthetic construct
  source 1..15: mol_type = other DNA
tggtttgtgtggttt

SEQ ID NO: 2395 - DNA, 15 bp, synthetic construct
  source 1..15: mol_type = other DNA
ccagcatggctatgc

SEQ ID NO: 2396 - DNA, 15 bp, synthetic construct
  source 1..15: mol_type = other DNA
ttggtagtacgccgg

SEQ ID NO: 2397 - DNA, 15 bp, synthetic construct
  source 1..15: mol_type = other DNA
catctgagcatgtgc

SEQ ID NO: 2398 - DNA, 15 bp, synthetic construct
  source 1..15: mol_type = other DNA
atgattaaaatggcc

SEQ ID NO: 2399 - DNA, 15 bp, synthetic construct
  source 1..15: mol_type = other DNA
taacactggatgaaa

SEQ ID NO: 2400 - DNA, 15 bp, synthetic construct
  source 1..15: mol_type = other DNA
ttaagccggtgtcaa

SEQ ID NO: 2401 - DNA, 15 bp, synthetic construct
  source 1..15: mol_type = other DNA
tgacatgaccatggc

SEQ ID NO: 2402 - DNA, 15 bp, synthetic construct
  source 1..15: mol_type = other DNA
ccagctccctataac

SEQ ID NO: 2403 - DNA, 15 bp, synthetic construct
  source 1..15: mol_type = other DNA
ggaagttgtcggcca

SEQ ID NO: 2404 - DNA, 15 bp, synthetic construct
  source 1..15: mol_type = other DNA
tgtcagatgcattgt

SEQ ID NO: 2405 - DNA, 15 bp, synthetic construct
  source 1..15: mol_type = other DNA
gattcagccatctcc

SEQ ID NO: 2406 - DNA, 15 bp, synthetic construct
  source 1..15: mol_type = other DNA
tcgctatatttgcca

SEQ ID NO: 2407 - DNA, 15 bp, synthetic construct
  source 1..15: mol_type = other DNA
agggctgaattggct

SEQ ID NO: 2408 - DNA, 15 bp, synthetic construct
  source 1..15: mol_type = other DNA
agcaaaaggagtgtc

SEQ ID NO: 2409 - DNA, 15 bp, synthetic construct
  source 1..15: mol_type = other DNA
gaccaggacaagttg

SEQ ID NO: 2410 - DNA, 15 bp, synthetic construct
  source 1..15: mol_type = other DNA
cagtacagagcctag

SEQ ID NO: 2411 - DNA, 15 bp, synthetic construct
  source 1..15: mol_type = other DNA
ctcatagtagaggtt

SEQ ID NO: 2412 - DNA, 15 bp, synthetic construct
  source 1..15: mol_type = other DNA
gtcatagaggaaagg

SEQ ID NO: 2413 - DNA, 15 bp, synthetic construct
  source 1..15: mol_type = other DNA
cttggctactcaacc

SEQ ID NO: 2414 - DNA, 15 bp, synthetic construct
  source 1..15: mol_type = other DNA
tttctcagacaaaca

SEQ ID NO: 2415 - DNA, 15 bp, synthetic construct
  source 1..15: mol_type = other DNA
atcccaagagatcac

SEQ ID NO: 2416 - DNA, 15 bp, synthetic construct
  source 1..15: mol_type = other DNA
gcagttccgcagtca

SEQ ID NO: 2417 - DNA, 15 bp, synthetic construct
  source 1..15: mol_type = other DNA
acatctgattttctc

SEQ ID NO: 2418 - DNA, 15 bp, synthetic construct
  source 1..15: mol_type = other DNA
ctctgtcttctctaa

SEQ ID NO: 2419 - DNA, 15 bp, synthetic construct
  source 1..15: mol_type = other DNA
agcgcttatccaacc

SEQ ID NO: 2420 - DNA, 15 bp, synthetic construct
  source 1..15: mol_type = other DNA
gggtggtttgtgaac

SEQ ID NO: 2421 - DNA, 15 bp, synthetic construct
  source 1..15: mol_type = other DNA
aacagaagccttaac

SEQ ID NO: 2422 - DNA, 15 bp, synthetic construct
  source 1..15: mol_type = other DNA
gatctgctcaaggtt

SEQ ID NO: 2423 - DNA, 15 bp, synthetic construct
  source 1..15: mol_type = other DNA
tacctagacctcggt

SEQ ID NO: 2424 - DNA, 15 bp, synthetic construct
  source 1..15: mol_type = other DNA
ggattcctcggaggc

SEQ ID NO: 2425 - DNA, 15 bp, synthetic construct
  source 1..15: mol_type = other DNA
atttccattgtcgaa

SEQ ID NO: 2426 - DNA, 15 bp, synthetic construct
  source 1..15: mol_type = other DNA
gtcagtgagttctgc

SEQ ID NO: 2427 - DNA, 15 bp, synthetic construct
  source 1..15: mol_type = other DNA
gattggtggcgtagt

SEQ ID NO: 2428 - DNA, 15 bp, synthetic construct
  source 1..15: mol_type = other DNA
aaacactgtgtgtac

SEQ ID NO: 2429 - DNA, 15 bp, synthetic construct
  source 1..15: mol_type = other DNA
gtccgtgatccactt

SEQ ID NO: 2430 - DNA, 15 bp, synthetic construct
  source 1..15: mol_type = other DNA
tttgttgtacctggg

SEQ ID NO: 2431 - DNA, 15 bp, synthetic construct
  source 1..15: mol_type = other DNA
actacattagtctgt

SEQ ID NO: 2432 - DNA, 15 bp, synthetic construct
  source 1..15: mol_type = other DNA
gtcctttagccggtt

SEQ ID NO: 2433 - DNA, 15 bp, synthetic construct
  source 1..15: mol_type = other DNA
agttgcctttgaggg

SEQ ID NO: 2434 - DNA, 15 bp, synthetic construct
  source 1..15: mol_type = other DNA
ttagggatttacgtc

SEQ ID NO: 2435 - DNA, 15 bp, synthetic construct
  source 1..15: mol_type = other DNA
aagcgccgctcagta

SEQ ID NO: 2436 - DNA, 15 bp, synthetic construct
  source 1..15: mol_type = other DNA
gaagcacttgttcag

SEQ ID NO: 2437 - DNA, 15 bp, synthetic construct
  source 1..15: mol_type = other DNA
tggaggagacattgt

SEQ ID NO: 2438 - DNA, 15 bp, synthetic construct
  source 1..15: mol_type = other DNA
aggccgtgtgtgtga

SEQ ID NO: 2439 - DNA, 15 bp, synthetic construct
  source 1..15: mol_type = other DNA
gtgtgatgatgcagc

SEQ ID NO: 2440 - DNA, 15 bp, synthetic construct
  source 1..15: mol_type = other DNA
cttgaagtagtccat

SEQ ID NO: 2441 - DNA, 15 bp, synthetic construct
  source 1..15: mol_type = other DNA
agactcaggttgtgg

SEQ ID NO: 2442 - DNA, 15 bp, synthetic construct
  source 1..15: mol_type = other DNA
gcagtctaagctgag

SEQ ID NO: 2443 - DNA, 15 bp, synthetic construct
  source 1..15: mol_type = other DNA
gagcccttgtcggat

SEQ ID NO: 2444 - DNA, 15 bp, synthetic construct
  source 1..15: mol_type = other DNA
cagctcatccacggt

SEQ ID NO: 2445 - DNA, 15 bp, synthetic construct
  source 1..15: mol_type = other DNA
gtgtactgaggcagg

SEQ ID NO: 2446 - DNA, 15 bp, synthetic construct
  source 1..15: mol_type = other DNA
gaagaaggcaaacat

SEQ ID NO: 2447 - DNA, 15 bp, synthetic construct
  source 1..15: mol_type = other DNA
ggacaggattgtgac

SEQ ID NO: 2448 - DNA, 15 bp, synthetic construct
  source 1..15: mol_type = other DNA
tcaagagacccactg

SEQ ID NO: 2449 - DNA, 15 bp, synthetic construct
  source 1..15: mol_type = other DNA
attgagtgtccgctg

SEQ ID NO: 2450 - DNA, 15 bp, synthetic construct
  source 1..15: mol_type = other DNA
cggatggcgttctgt

SEQ ID NO: 2451 - DNA, 15 bp, synthetic construct
  source 1..15: mol_type = other DNA
tgtgcgagcagctga

SEQ ID NO: 2452 - DNA, 15 bp, synthetic construct
  source 1..15: mol_type = other DNA
ttctcacatccgggc

SEQ ID NO: 2453 - DNA, 15 bp, synthetic construct
  source 1..15: mol_type = other DNA
ctcacttcttggtcc

SEQ ID NO: 2454 - DNA, 15 bp, synthetic construct
  source 1..15: mol_type = other DNA
ggtgacgctgtagat

SEQ ID NO: 2455 - DNA, 15 bp, synthetic construct
  source 1..15: mol_type = other DNA
tcaattgttcccggc

SEQ ID NO: 2456 - DNA, 15 bp, synthetic construct
  source 1..15: mol_type = other DNA
catcgttgaactcca

SEQ ID NO: 2457 - DNA, 15 bp, synthetic construct
  source 1..15: mol_type = other DNA
tcaaagtagcagctg

SEQ ID NO: 2458 - DNA, 15 bp, synthetic construct
  source 1..15: mol_type = other DNA
caccacaagggtcag

SEQ ID NO: 2459 - DNA, 15 bp, synthetic construct
  source 1..15: mol_type = other DNA
actacagccaggctt

SEQ ID NO: 2460 - DNA, 15 bp, synthetic construct
  source 1..15: mol_type = other DNA
aggcacactttttgg

SEQ ID NO: 2461 - DNA, 15 bp, synthetic construct
  source 1..15: mol_type = other DNA
gtttccagtttgaaa

SEQ ID NO: 2462 - DNA, 15 bp, synthetic construct
  source 1..15: mol_type = other DNA
cagtcaggctagggt

SEQ ID NO: 2463 - DNA, 15 bp, synthetic construct
  source 1..15: mol_type = other DNA
gccttcaggacgcct

SEQ ID NO: 2464 - DNA, 15 bp, synthetic construct
  source 1..15: mol_type = other DNA
ctactatcatgggcg

SEQ ID NO: 2465 - DNA, 15 bp, synthetic construct
  source 1..15: mol_type = other DNA
aataaggctcagagc

SEQ ID NO: 2466 - DNA, 15 bp, synthetic construct
  source 1..15: mol_type = other DNA
ccagagtgagatgca

SEQ ID NO: 2467 - DNA, 15 bp, synthetic construct
  source 1..15: mol_type = other DNA
ttacactacacgccc

SEQ ID NO: 2468 - DNA, 15 bp, synthetic construct
  source 1..15: mol_type = other DNA
caggacgtccctgct

SEQ ID NO: 2469 - DNA, 15 bp, synthetic construct
  source 1..15: mol_type = other DNA
agtatcaagacggcg

SEQ ID NO: 2470 - DNA, 15 bp, synthetic construct
  source 1..15: mol_type = other DNA
attctgcgagccagg

SEQ ID NO: 2471 - DNA, 15 bp, synthetic construct
  source 1..15: mol_type = other DNA
ggcaactggtgaacg

SEQ ID NO: 2472 - DNA, 15 bp, synthetic construct
  source 1..15: mol_type = other DNA
ctccagagtgtggtt

SEQ ID NO: 2473 - DNA, 15 bp, synthetic construct
  source 1..15: mol_type = other DNA
tccgtagtagggcgg

SEQ ID NO: 2474 - DNA, 15 bp, synthetic construct
  source 1..15: mol_type = other DNA
ttcgccactgtggcc

SEQ ID NO: 2475 - DNA, 15 bp, synthetic construct
  source 1..15: mol_type = other DNA
aaaccctccgagcac

SEQ ID NO: 2476 - DNA, 15 bp, synthetic construct
  source 1..15: mol_type = other DNA
ggagatctgaaggca

SEQ ID NO: 2477 - DNA, 15 bp, synthetic construct
  source 1..15: mol_type = other DNA
ctctttctcgtcctg

SEQ ID NO: 2478 - DNA, 15 bp, synthetic construct
  source 1..15: mol_type = other DNA
cggtcagattgcgtt

SEQ ID NO: 2479 - DNA, 15 bp, synthetic construct
  source 1..15: mol_type = other DNA
gctacccagatgcaa

SEQ ID NO: 2480 - DNA, 15 bp, synthetic construct
  source 1..15: mol_type = other DNA
aaaacgggaccaggt

SEQ ID NO: 2481 - DNA, 15 bp, synthetic construct
  source 1..15: mol_type = other DNA
cacagtcaaggaaac

SEQ ID NO: 2482 - DNA, 15 bp, synthetic construct
  source 1..15: mol_type = other DNA
aaggcagtgatcact

SEQ ID NO: 2483 - DNA, 15 bp, synthetic construct
  source 1..15: mol_type = other DNA
gcaagtcgaaaggga

SEQ ID NO: 2484 - DNA, 15 bp, synthetic construct
  source 1..15: mol_type = other DNA
cgtcgatgttaaaaa

SEQ ID NO: 2485 - DNA, 15 bp, synthetic construct
  source 1..15: mol_type = other DNA
catgaagcagaggcg

SEQ ID NO: 2486 - DNA, 15 bp, synthetic construct
  source 1..15: mol_type = other DNA
tggtatttcctttgc

SEQ ID NO: 2487 - DNA, 15 bp, synthetic construct
  source 1..15: mol_type = other DNA
cgccggactcttaga

SEQ ID NO: 2488 - DNA, 15 bp, synthetic construct
  source 1..15: mol_type = other DNA
gggctgagattccag

SEQ ID NO: 2489 - DNA, 15 bp, synthetic construct
  source 1..15: mol_type = other DNA
caaaggagaaggttt

SEQ ID NO: 2490 - DNA, 15 bp, synthetic construct
  source 1..15: mol_type = other DNA
gaacacagacaccac

SEQ ID NO: 2491 - DNA, 15 bp, synthetic construct
  source 1..15: mol_type = other DNA
tggcagtttgtccat

SEQ ID NO: 2492 - DNA, 15 bp, synthetic construct
  source 1..15: mol_type = other DNA
aatctcattgcccac

SEQ ID NO: 2493 - DNA, 15 bp, synthetic construct
  source 1..15: mol_type = other DNA
ggaaagctctgggtt

SEQ ID NO: 2494 - DNA, 15 bp, synthetic construct
  source 1..15: mol_type = other DNA
gtgttggaggagtaa

SEQ ID NO: 2495 - DNA, 15 bp, synthetic construct
  source 1..15: mol_type = other DNA
gtcactaaagggtcc

SEQ ID NO: 2496 - DNA, 15 bp, synthetic construct
  source 1..15: mol_type = other DNA
aatatctcttccagc

SEQ ID NO: 2497 - DNA, 15 bp, synthetic construct
  source 1..15: mol_type = other DNA
catccattcaatgcc

SEQ ID NO: 2498 - DNA, 15 bp, synthetic construct
  source 1..15: mol_type = other DNA
gaggcattgcactgt

SEQ ID NO: 2499 - DNA, 15 bp, synthetic construct
  source 1..15: mol_type = other DNA
agttagagtttcttc

SEQ ID NO: 2500 - DNA, 15 bp, synthetic construct
  source 1..15: mol_type = other DNA
tccgtcgtcccaacc

SEQ ID NO: 2501 - DNA, 15 bp, synthetic construct
  source 1..15: mol_type = other DNA
gtactcaaagaagcg

SEQ ID NO: 2502 - DNA, 15 bp, synthetic construct
  source 1..15: mol_type = other DNA
ggtggaagtagtctt

SEQ ID NO: 2503 - DNA, 15 bp, synthetic construct
  source 1..15: mol_type = other DNA
tagatggactaacat

SEQ ID NO: 2504 - DNA, 15 bp, synthetic construct
  source 1..15: mol_type = other DNA
tgttgaaggtagcat

SEQ ID NO: 2505 - DNA, 15 bp, synthetic construct
  source 1..15: mol_type = other DNA
agctcaggcgtaaat

SEQ ID NO: 2506 - DNA, 15 bp, synthetic construct
  source 1..15: mol_type = other DNA
ttctacagagtggat

SEQ ID NO: 2507 - DNA, 15 bp, synthetic construct
  source 1..15: mol_type = other DNA
tgatgctccagttcg

SEQ ID NO: 2508 - DNA, 15 bp, synthetic construct
  source 1..15: mol_type = other DNA
attctgagagtgagc

SEQ ID NO: 2509 - DNA, 15 bp, synthetic construct
  source 1..15: mol_type = other DNA
tgtcacaaattttcc

SEQ ID NO: 2510 - DNA, 15 bp, synthetic construct
  source 1..15: mol_type = other DNA
gcttaagccgcctcc

SEQ ID NO: 2511 - DNA, 15 bp, synthetic construct
  source 1..15: mol_type = other DNA
agccttaggaagtgg

SEQ ID NO: 2512 - DNA, 15 bp, synthetic construct
  source 1..15: mol_type = other DNA
cagccattgtgggct

SEQ ID NO: 2513 - DNA, 15 bp, synthetic construct
  source 1..15: mol_type = other DNA
gggttggaaagcaca

SEQ ID NO: 2514 - DNA, 15 bp, synthetic construct
  source 1..15: mol_type = other DNA
gtcgcgcatggtagc

SEQ ID NO: 2515 - DNA, 15 bp, synthetic construct
  source 1..15: mol_type = other DNA
ctggaatgtcacttc

SEQ ID NO: 2516 - DNA, 15 bp, synthetic construct
  source 1..15: mol_type = other DNA
aatcagcaagtcccg

SEQ ID NO: 2517 - DNA, 15 bp, synthetic construct
  source 1..15: mol_type = other DNA
gcagaatccagtcct

SEQ ID NO: 2518 - DNA, 15 bp, synthetic construct
  source 1..15: mol_type = other DNA
gccaccatcttccaa

SEQ ID NO: 2519 - DNA, 15 bp, synthetic construct
  source 1..15: mol_type = other DNA
ggctattctggagtg

SEQ ID NO: 2520 - DNA, 15 bp, synthetic construct
  source 1..15: mol_type = other DNA
cttccgcgtacctgg

SEQ ID NO: 2521 - DNA, 15 bp, synthetic construct
  source 1..15: mol_type = other DNA
tgagatccaacaggc

SEQ ID NO: 2522 - DNA, 15 bp, synthetic construct
  source 1..15: mol_type = other DNA
gacttagcataaact

SEQ ID NO: 2523 - DNA, 15 bp, synthetic construct
  source 1..15: mol_type = other DNA
atccaccgatgaggg

SEQ ID NO: 2524 - DNA, 15 bp, synthetic construct
  source 1..15: mol_type = other DNA
ccgtcctacacaccc

SEQ ID NO: 2525 - DNA, 15 bp, synthetic construct
  source 1..15: mol_type = other DNA
agacaggtcctgtag

SEQ ID NO: 2526 - DNA, 15 bp, synthetic construct
  source 1..15: mol_type = other DNA
gctcagacgagagaa

SEQ ID NO: 2527 - DNA, 15 bp, synthetic construct
  source 1..15: mol_type = other DNA
ggcagtttctccggc

SEQ ID NO: 2528 - DNA, 15 bp, synthetic construct
  source 1..15: mol_type = other DNA
ttattgaaggactac

SEQ ID NO: 2529 - DNA, 15 bp, synthetic construct
  source 1..15: mol_type = other DNA
aatttctgcagacgt

SEQ ID NO: 2530 - DNA, 15 bp, synthetic construct
  source 1..15: mol_type = other DNA
tctcctcatcacgca

SEQ ID NO: 2531 - DNA, 15 bp, synthetic construct
  source 1..15: mol_type = other DNA
aagagatcttgttct

SEQ ID NO: 2532 - DNA, 15 bp, synthetic construct
  source 1..15: mol_type = other DNA
cttgcttgacacttt

SEQ ID NO: 2533 - DNA, 15 bp, synthetic construct
  source 1..15: mol_type = other DNA
cacaccctgttttat

SEQ ID NO: 2534 - DNA, 15 bp, synthetic construct
  source 1..15: mol_type = other DNA
ggatcgaggaagcga

SEQ ID NO: 2535 - DNA, 15 bp, synthetic construct
  source 1..15: mol_type = other DNA
cccagctatacagtg

SEQ ID NO: 2536 - DNA, 15 bp, synthetic construct
  source 1..15: mol_type = other DNA
gacctccgtccactg

SEQ ID NO: 2537 - DNA, 15 bp, synthetic construct
  source 1..15: mol_type = other DNA
gactcccatcctgac

SEQ ID NO: 2538 - DNA, 15 bp, synthetic construct
  source 1..15: mol_type = other DNA
ccctgctgacatgtc

SEQ ID NO: 2539 - DNA, 15 bp, synthetic construct
  source 1..15: mol_type = other DNA
gccacactgttcctt

SEQ ID NO: 2540 - DNA, 15 bp, synthetic construct
  source 1..15: mol_type = other DNA
gtcatcagcaccttc

SEQ ID NO: 2541 - DNA, 15 bp, synthetic construct
  source 1..15: mol_type = other DNA
gacctcatttgtcca

SEQ ID NO: 2542 - DNA, 15 bp, synthetic construct
  source 1..15: mol_type = other DNA
gtcagactgagtttg

SEQ ID NO: 2543 - DNA, 15 bp, synthetic construct
  source 1..15: mol_type = other DNA
tgacagctctcgagc

SEQ ID NO: 2544 - DNA, 15 bp, synthetic construct
  source 1..15: mol_type = other DNA
tccatgaacaaggac

SEQ ID NO: 2545 - DNA, 15 bp, synthetic construct
  source 1..15: mol_type = other DNA
ttccagagaacaagc

SEQ ID NO: 2546 - DNA, 15 bp, synthetic construct
  source 1..15: mol_type = other DNA
aagtcagtccttggc

SEQ ID NO: 2547 - DNA, 15 bp, synthetic construct
  source 1..15: mol_type = other DNA
cggatggtcatgtcc

SEQ ID NO: 2548 - DNA, 15 bp, synthetic construct
  source 1..15: mol_type = other DNA
ctctgagtacaggtc

SEQ ID NO: 2549 - DNA, 15 bp, synthetic construct
  source 1..15: mol_type = other DNA
aactatccaggtccc

SEQ ID NO: 2550 - DNA, 15 bp, synthetic construct
  source 1..15: mol_type = other DNA
ttttgggcacactgg

SEQ ID NO: 2551 - DNA, 15 bp, synthetic construct
  source 1..15: mol_type = other DNA
cggcaatagtcaggg

SEQ ID NO: 2552 - DNA, 15 bp, synthetic construct
  source 1..15: mol_type = other DNA
gctgcctaagctcag

SEQ ID NO: 2553 - DNA, 15 bp, synthetic construct
  source 1..15: mol_type = other DNA
gtacagctctccgaa

SEQ ID NO: 2554 - DNA, 15 bp, synthetic construct
  source 1..15: mol_type = other DNA
gggtggacttgcctg

SEQ ID NO: 2555 - DNA, 15 bp, synthetic construct
  source 1..15: mol_type = other DNA
cccagaacttgtcgg

SEQ ID NO: 2556 - DNA, 15 bp, synthetic construct
  source 1..15: mol_type = other DNA
agcagcactaagcgg

SEQ ID NO: 2557 - DNA, 15 bp, synthetic construct
  source 1..15: mol_type = other DNA
gctgacactgagcgg

SEQ ID NO: 2558 - DNA, 15 bp, synthetic construct
  source 1..15: mol_type = other DNA
aggcaaagcggtggt

SEQ ID NO: 2559 - DNA, 15 bp, synthetic construct
  source 1..15: mol_type = other DNA
tgacgaccaaggcta

SEQ ID NO: 2560 - DNA, 15 bp, synthetic construct
  source 1..15: mol_type = other DNA
cggtcaatactcagg

SEQ ID NO: 2561 - DNA, 15 bp, synthetic construct
  source 1..15: mol_type = other DNA
ttgttggcaagaaat

SEQ ID NO: 2562 - DNA, 15 bp, synthetic construct
  source 1..15: mol_type = other DNA
gctgtgagtagttgt

SEQ ID NO: 2563 - DNA, 15 bp, synthetic construct
  source 1..15: mol_type = other DNA
ctcataacctttctc

SEQ ID NO: 2564 - DNA, 15 bp, synthetic construct
  source 1..15: mol_type = other DNA
tctgcgtttctgtca

SEQ ID NO: 2565 - DNA, 15 bp, synthetic construct
  source 1..15: mol_type = other DNA
acagagaacaaacac

SEQ ID NO: 2566 - DNA, 15 bp, synthetic construct
  source 1..15: mol_type = other DNA
ttttgtttggcagtt

SEQ ID NO: 2567 - DNA, 15 bp, synthetic construct
  source 1..15: mol_type = other DNA
atcctacacaaggca

SEQ ID NO: 2568 - DNA, 15 bp, synthetic construct
  source 1..15: mol_type = other DNA
catgttcaatccttt

SEQ ID NO: 2569 - DNA, 15 bp, synthetic construct
  source 1..15: mol_type = other DNA
gctacattccaggaa

SEQ ID NO: 2570 - DNA, 15 bp, synthetic construct
  source 1..15: mol_type = other DNA
tgaagacgaggctgt

SEQ ID NO: 2571 - DNA, 15 bp, synthetic construct
  source 1..15: mol_type = other DNA
agtcatttccctgag

SEQ ID NO: 2572 - DNA, 15 bp, synthetic construct
  source 1..15: mol_type = other DNA
ggcttacttccgagt

SEQ ID NO: 2573 - DNA, 15 bp, synthetic construct
  source 1..15: mol_type = other DNA
aatcctttcagcctc

SEQ ID NO: 2574 - DNA, 15 bp, synthetic construct
  source 1..15: mol_type = other DNA
aaaagggtccatgca

SEQ ID NO: 2575 - DNA, 15 bp, synthetic construct
  source 1..15: mol_type = other DNA
agagcgcctcctttt

SEQ ID NO: 2576 - DNA, 15 bp, synthetic construct
  source 1..15: mol_type = other DNA
tagaaatcgatacac

SEQ ID NO: 2577 - DNA, 15 bp, synthetic construct
  source 1..15: mol_type = other DNA
tagcagatgagaatg

SEQ ID NO: 2578 - DNA, 15 bp, synthetic construct
  source 1..15: mol_type = other DNA
gtttgtcatacagtt

SEQ ID NO: 2579 - DNA, 15 bp, synthetic construct
  source 1..15: mol_type = other DNA
tgtttgccatttgta

SEQ ID NO: 2580 - DNA, 15 bp, synthetic construct
  source 1..15: mol_type = other DNA
tactagaatccagac

SEQ ID NO: 2581 - DNA, 15 bp, synthetic construct
  source 1..15: mol_type = other DNA
attccaaaagagttc

SEQ ID NO: 2582 - DNA, 15 bp, synthetic construct
  source 1..15: mol_type = other DNA
ttgatgaccttctct

SEQ ID NO: 2583 - DNA, 15 bp, synthetic construct
  source 1..15: mol_type = other DNA
ggacagtacacccga

SEQ ID NO: 2584 - DNA, 15 bp, synthetic construct
  source 1..15: mol_type = other DNA
cttcttctgactcct

SEQ ID NO: 2585 - DNA, 15 bp, synthetic construct
  source 1..15: mol_type = other DNA
gttaagaggcaaccc

SEQ ID NO: 2586 - DNA, 15 bp, synthetic construct
  source 1..15: mol_type = other DNA
gtacgtcatggtact

SEQ ID NO: 2587 - DNA, 15 bp, synthetic construct
  source 1..15: mol_type = other DNA
tcgcttgtgagaggg

SEQ ID NO: 2588 - DNA, 15 bp, synthetic construct
  source 1..15: mol_type = other DNA
atggattccttcact

SEQ ID NO: 2589 - DNA, 15 bp, synthetic construct
  source 1..15: mol_type = other DNA
gattttccgctcagc

SEQ ID NO: 2590 - DNA, 15 bp, synthetic construct
  source 1..15: mol_type = other DNA
ctttggtcgctgcag

SEQ ID NO: 2591 - DNA, 15 bp, synthetic construct
  source 1..15: mol_type = other DNA
ggcatccgcagactg

SEQ ID NO: 2592 - DNA, 15 bp, synthetic construct
  source 1..15: mol_type = other DNA
gaagcttctagggta

SEQ ID NO: 2593 - DNA, 15 bp, synthetic construct
  source 1..15: mol_type = other DNA
gaaccaacactggcc

SEQ ID NO: 2594 - DNA, 15 bp, synthetic construct
  source 1..15: mol_type = other DNA
aaggaaatggcgtta

SEQ ID NO: 2595 - DNA, 15 bp, synthetic construct
  source 1..15: mol_type = other DNA
tcaatgaagggtttg

SEQ ID NO: 2596 - DNA, 15 bp, synthetic construct
  source 1..15: mol_type = other DNA
gcacgtcaggaatga

SEQ ID NO: 2597 - DNA, 15 bp, synthetic construct
  source 1..15: mol_type = other DNA
gtcgagtctggagtt

SEQ ID NO: 2598 - DNA, 15 bp, synthetic construct
  source 1..15: mol_type = other DNA
gccagcttggtagaa

SEQ ID NO: 2599 - DNA, 15 bp, synthetic construct
  source 1..15: mol_type = other DNA
gttactgatagtgtt

SEQ ID NO: 2600 - DNA, 15 bp, synthetic construct
  source 1..15: mol_type = other DNA
cggttgttgtaacta

SEQ ID NO: 2601 - DNA, 15 bp, synthetic construct
  source 1..15: mol_type = other DNA
cttcagaggcaatgg

SEQ ID NO: 2602 - DNA, 15 bp, synthetic construct
  source 1..15: mol_type = other DNA
caatgccttaactga

SEQ ID NO: 2603 - DNA, 15 bp, synthetic construct
  source 1..15: mol_type = other DNA
tagcggtgtgctgcc

SEQ ID NO: 2604 - DNA, 15 bp, synthetic construct
  source 1..15: mol_type = other DNA
aaatctgtgcttaag

SEQ ID NO: 2605 - DNA, 15 bp, synthetic construct
  source 1..15: mol_type = other DNA
attgagattccgatc

SEQ ID NO: 2606 - DNA, 15 bp, synthetic construct
  source 1..15: mol_type = other DNA
agggaaactctttct

SEQ ID NO: 2607 - DNA, 15 bp, synthetic construct
  source 1..15: mol_type = other DNA
ctattgtgagtcctg

SEQ ID NO: 2608 - DNA, 15 bp, synthetic construct
  source 1..15: mol_type = other DNA
acctcggaggcttcc

SEQ ID NO: 2609 - DNA, 15 bp, synthetic construct
  source 1..15: mol_type = other DNA
tgtagggtcttgaat

SEQ ID NO: 2610 - DNA, 15 bp, synthetic construct
  source 1..15: mol_type = other DNA
ctggttattgagtga

SEQ ID NO: 2611 - DNA, 15 bp, synthetic construct
  source 1..15: mol_type = other DNA
gaggatgccagaaat

SEQ ID NO: 2612 - DNA, 15 bp, synthetic construct
  source 1..15: mol_type = other DNA
ttcaaggccaaagga

SEQ ID NO: 2613 - DNA, 15 bp, synthetic construct
  source 1..15: mol_type = other DNA
gtcttttgcaatcaa

SEQ ID NO: 2614 - DNA, 15 bp, synthetic construct
  source 1..15: mol_type = other DNA
tcgcacaacaaaggg

SEQ ID NO: 2615 - DNA, 15 bp, synthetic construct
  source 1..15: mol_type = other DNA
tcaacctgaaaatct

SEQ ID NO: 2616 - DNA, 15 bp, synthetic construct
  source 1..15: mol_type = other DNA
tatagacaccaggcc

SEQ ID NO: 2617 - DNA, 15 bp, synthetic construct
  source 1..15: mol_type = other DNA
ttccaatcacagggt

SEQ ID NO: 2618 - DNA, 15 bp, synthetic construct
  source 1..15: mol_type = other DNA
aaactgctcccttga

SEQ ID NO: 2619 - DNA, 15 bp, synthetic construct
  source 1..15: mol_type = other DNA
gagaggaaagaggtg

SEQ ID NO: 2620 - DNA, 15 bp, synthetic construct
  source 1..15: mol_type = other DNA
ctggacttggctcca

SEQ ID NO: 2621 - DNA, 15 bp, synthetic construct
  source 1..15: mol_type = other DNA
tataattactgcacc

SEQ ID NO: 2622 - DNA, 15 bp, synthetic construct
  source 1..15: mol_type = other DNA
ggccctaatttctcc

SEQ ID NO: 2623 - DNA, 15 bp, synthetic construct
  source 1..15: mol_type = other DNA
tttattcagttgctg

SEQ ID NO: 2624 - DNA, 15 bp, synthetic construct
  source 1..15: mol_type = other DNA
ccaccataagcctcc

SEQ ID NO: 2625 - DNA, 15 bp, synthetic construct
  source 1..15: mol_type = other DNA
gagactttggtgcag

SEQ ID NO: 2626 - DNA, 15 bp, synthetic construct
  source 1..15: mol_type = other DNA
tcgtccataggagac

SEQ ID NO: 2627 - DNA, 15 bp, synthetic construct
  source 1..15: mol_type = other DNA
gtatcaggaagccac

SEQ ID NO: 2628 - DNA, 15 bp, synthetic construct
  source 1..15: mol_type = other DNA
acagtctagtgggtg

SEQ ID NO: 2629 - DNA, 15 bp, synthetic construct
  source 1..15: mol_type = other DNA
ttgcatcttctcagg

SEQ ID NO: 2630 - DNA, 15 bp, synthetic construct
  source 1..15: mol_type = other DNA
ggtgcatagtcttac

SEQ ID NO: 2631 - DNA, 15 bp, synthetic construct
  source 1..15: mol_type = other DNA
tcataagataagcca

SEQ ID NO: 2632 - DNA, 15 bp, synthetic construct
  source 1..15: mol_type = other DNA
taatatctgtgacct

SEQ ID NO: 2633 - DNA, 15 bp, synthetic construct
  source 1..15: mol_type = other DNA
cacaagagggcctcc

SEQ ID NO: 2634 - DNA, 15 bp, synthetic construct
  source 1..15: mol_type = other DNA
gtctcagatattccc

SEQ ID NO: 2635 - DNA, 15 bp, synthetic construct
  source 1..15: mol_type = other DNA
tcgcactttcgatct

SEQ ID NO: 2636 - DNA, 15 bp, synthetic construct
  source 1..15: mol_type = other DNA
tggtactgtcgtaat

SEQ ID NO: 2637 - DNA, 15 bp, synthetic construct
  source 1..15: mol_type = other DNA
gagtgttttcccagg

SEQ ID NO: 2638 - DNA, 15 bp, synthetic construct
  source 1..15: mol_type = other DNA
gtcttctttggatcc

SEQ ID NO: 2639 - DNA, 15 bp, synthetic construct
  source 1..15: mol_type = other DNA
tacgtccttacacac

SEQ ID NO: 2640 - DNA, 15 bp, synthetic construct
  source 1..15: mol_type = other DNA
ttccagaaacaaatg

SEQ ID NO: 2641 - DNA, 15 bp, synthetic construct
  source 1..15: mol_type = other DNA
gcagtgtggttgcta

SEQ ID NO: 2642 - DNA, 15 bp, synthetic construct
  source 1..15: mol_type = other DNA
ttgcagaaactgaac

SEQ ID NO: 2643 - DNA, 15 bp, synthetic construct
  source 1..15: mol_type = other DNA
ttattacagtcctgc

SEQ ID NO: 2644 - DNA, 15 bp, synthetic construct
  source 1..15: mol_type = other DNA
cactaggatgccgcc

SEQ ID NO: 2645 - DNA, 15 bp, synthetic construct
  source 1..15: mol_type = other DNA
ggtgtcccttttttg

SEQ ID NO: 2646 - DNA, 15 bp, synthetic construct
  source 1..15: mol_type = other DNA
gcgcttcattgttct

SEQ ID NO: 2647 - DNA, 15 bp, synthetic construct
  source 1..15: mol_type = other DNA
cgttcacactggcag

SEQ ID NO: 2648 - DNA, 15 bp, synthetic construct
  source 1..15: mol_type = other DNA
agtgtgcgcctaaaa

SEQ ID NO: 2649 - DNA, 15 bp, synthetic construct
  source 1..15: mol_type = other DNA
aagacacctttacag

SEQ ID NO: 2650 - DNA, 15 bp, synthetic construct
  source 1..15: mol_type = other DNA
tgtggagcatcttga

SEQ ID NO: 2651 - DNA, 15 bp, synthetic construct
  source 1..15: mol_type = other DNA
tcaactggcataaag

SEQ ID NO: 2652 - DNA, 15 bp, synthetic construct
  source 1..15: mol_type = other DNA
ccgccatactggatg

SEQ ID NO: 2653 - DNA, 15 bp, synthetic construct
  source 1..15: mol_type = other DNA
cctagttgaaggtgg

SEQ ID NO: 2654 - DNA, 15 bp, synthetic construct
  source 1..15: mol_type = other DNA
ggtgtagattccagg

SEQ ID NO: 2655 - DNA, 15 bp, synthetic construct
  source 1..15: mol_type = other DNA
cgagcatattaggaa

SEQ ID NO: 2656 - DNA, 15 bp, synthetic construct
  source 1..15: mol_type = other DNA
ttgcttttgatccaa

SEQ ID NO: 2657 - DNA, 15 bp, synthetic construct
  source 1..15: mol_type = other DNA
gttcaatgttatcac

SEQ ID NO: 2658 - DNA, 15 bp, synthetic construct
  source 1..15: mol_type = other DNA
ggaatgaggtgacac

SEQ ID NO: 2659 - DNA, 15 bp, synthetic construct
  source 1..15: mol_type = other DNA
tgcctatagttaaca

SEQ ID NO: 2660 - DNA, 15 bp, synthetic construct
  source 1..15: mol_type = other DNA
tacatcagtgataca

SEQ ID NO: 2661 - DNA, 15 bp, synthetic construct
  source 1..15: mol_type = other DNA
tctcgcagggtgtca

SEQ ID NO: 2662 - DNA, 15 bp, synthetic construct
  source 1..15: mol_type = other DNA
cccatatgtgctctg

SEQ ID NO: 2663 - DNA, 15 bp, synthetic construct
  source 1..15: mol_type = other DNA
tctggatcggtggct

SEQ ID NO: 2664 - DNA, 15 bp, synthetic construct
  source 1..15: mol_type = other DNA
gtcgccgttgtagta

SEQ ID NO: 2665 - DNA, 15 bp, synthetic construct
  source 1..15: mol_type = other DNA
attgccctttggcga

SEQ ID NO: 2666 - DNA, 15 bp, synthetic construct
  source 1..15: mol_type = other DNA
tttggttccagatct

SEQ ID NO: 2667 - DNA, 15 bp, synthetic construct
  source 1..15: mol_type = other DNA
ctcattggccaatgt

SEQ ID NO: 2668 - DNA, 15 bp, synthetic construct
  source 1..15: mol_type = other DNA
ctgatggttgctcca

SEQ ID NO: 2669 - DNA, 15 bp, synthetic construct
  source 1..15: mol_type = other DNA
ctcatagtttctgaa

SEQ ID NO: 2670 - DNA, 15 bp, synthetic construct
  source 1..15: mol_type = other DNA
gtcatgccacactac

SEQ ID NO: 2671 - DNA, 15 bp, synthetic construct
  source 1..15: mol_type = other DNA
gggtcatttacatta

SEQ ID NO: 2672 - DNA, 15 bp, synthetic construct
  source 1..15: mol_type = other DNA
gggctcaactgctag

SEQ ID NO: 2673 - DNA, 15 bp, synthetic construct
  source 1..15: mol_type = other DNA
tcagaatcactggga

SEQ ID NO: 2674 - DNA, 15 bp, synthetic construct
  source 1..15: mol_type = other DNA
gggatttggatccgg

SEQ ID NO: 2675 - DNA, 15 bp, synthetic construct
  source 1..15: mol_type = other DNA
tctgccgagtcggtg

SEQ ID NO: 2676 - DNA, 15 bp, synthetic construct
  source 1..15: mol_type = other DNA
agataagagccagag

SEQ ID NO: 2677 - DNA, 15 bp, synthetic construct
  source 1..15: mol_type = other DNA
tgagtgaggttactc

SEQ ID NO: 2678 - DNA, 15 bp, synthetic construct
  source 1..15: mol_type = other DNA
tgctccacattcagg

SEQ ID NO: 2679 - DNA, 15 bp, synthetic construct
  source 1..15: mol_type = other DNA
caaacacaggacagg

SEQ ID NO: 2680 - DNA, 15 bp, synthetic construct
  source 1..15: mol_type = other DNA
caagcctataccgtc

SEQ ID NO: 2681 - DNA, 15 bp, synthetic construct
  source 1..15: mol_type = other DNA
cacctctgttaggca

SEQ ID NO: 2682 - DNA, 15 bp, synthetic construct
  source 1..15: mol_type = other DNA
aagggaagatgtgaa

SEQ ID NO: 2683 - DNA, 15 bp, synthetic construct
  source 1..15: mol_type = other DNA
tgtgacaatgcttct

SEQ ID NO: 2684 - DNA, 15 bp, synthetic construct
  source 1..15: mol_type = other DNA
caggtctacagtcac

SEQ ID NO: 2685 - DNA, 15 bp, synthetic construct
  source 1..15: mol_type = other DNA
actgtctactccaca

SEQ ID NO: 2686 - DNA, 15 bp, synthetic construct
  source 1..15: mol_type = other DNA
cgggtgtctgattgc

SEQ ID NO: 2687 - DNA, 15 bp, synthetic construct
  source 1..15: mol_type = other DNA
ttctgatgtctgtcc

SEQ ID NO: 2688 - DNA, 15 bp, synthetic construct
  source 1..15: mol_type = other DNA
ccaattctgtgaaca

SEQ ID NO: 2689 - DNA, 15 bp, synthetic construct
  source 1..15: mol_type = other DNA
tgcaaagcgacaacc

SEQ ID NO: 2690 - DNA, 15 bp, synthetic construct
  source 1..15: mol_type = other DNA
atcaaatgcacttcg

SEQ ID NO: 2691 - DNA, 15 bp, synthetic construct
  source 1..15: mol_type = other DNA
tggcaagaatttgag

SEQ ID NO: 2692 - DNA, 15 bp, synthetic construct
  source 1..15: mol_type = other DNA
ttactacaactcaga

SEQ ID NO: 2693 - DNA, 15 bp, synthetic construct
  source 1..15: mol_type = other DNA
gtgtcctatgctcaa

SEQ ID NO: 2694 - DNA, 15 bp, synthetic construct
  source 1..15: mol_type = other DNA
tgctcacgagcagag

SEQ ID NO: 2695 - DNA, 15 bp, synthetic construct
  source 1..15: mol_type = other DNA
caactccctgtgatc

SEQ ID NO: 2696 - DNA, 15 bp, synthetic construct
  source 1..15: mol_type = other DNA
gtcacaatctggttc

SEQ ID NO: 2697 - DNA, 15 bp, synthetic construct
  source 1..15: mol_type = other DNA
aggctcaaccgacat

SEQ ID NO: 2698 - DNA, 15 bp, synthetic construct
  source 1..15: mol_type = other DNA
tcgcatgctcaatac

SEQ ID NO: 2699 - DNA, 15 bp, synthetic construct
  source 1..15: mol_type = other DNA
gtcagggttcttcaa

SEQ ID NO: 2700 - DNA, 15 bp, synthetic construct
  source 1..15: mol_type = other DNA
ctactgaagggccaa

SEQ ID NO: 2701 - DNA, 15 bp, synthetic construct
  source 1..15: mol_type = other DNA
ttattcagggccaca

SEQ ID NO: 2702 - DNA, 15 bp, synthetic construct
  source 1..15: mol_type = other DNA
ctcctcctatatcac

SEQ ID NO: 2703 - DNA, 15 bp, synthetic construct
  source 1..15: mol_type = other DNA
accgcgacgacactg

SEQ ID NO: 2704 - DNA, 15 bp, synthetic construct
  source 1..15: mol_type = other DNA
atctgggaatggagg

SEQ ID NO: 2705 - DNA, 15 bp, synthetic construct
  source 1..15: mol_type = other DNA
aaggtagccctgatg

SEQ ID NO: 2706 - DNA, 15 bp, synthetic construct
  source 1..15: mol_type = other DNA
ccaacacacattagg

SEQ ID NO: 2707 - DNA, 15 bp, synthetic construct
  source 1..15: mol_type = other DNA
aaccctagccttatg

SEQ ID NO: 2708 - DNA, 15 bp, synthetic construct
  source 1..15: mol_type = other DNA
aagttaaccatgatg

SEQ ID NO: 2709 - DNA, 15 bp, synthetic construct
  source 1..15: mol_type = other DNA
tgctagaacccagag

SEQ ID NO: 2710 - DNA, 15 bp, synthetic construct
  source 1..15: mol_type = other DNA
ttctgagccagtgga

SEQ ID NO: 2711 - DNA, 15 bp, synthetic construct
  source 1..15: mol_type = other DNA
ctggaaggttctcat

SEQ ID NO: 2712 - DNA, 15 bp, synthetic construct
  source 1..15: mol_type = other DNA
tttgtctcttgatac

SEQ ID NO: 2713 - DNA, 15 bp, synthetic construct
  source 1..15: mol_type = other DNA
tcaagtctggagtaa

SEQ ID NO: 2714 - DNA, 15 bp, synthetic construct
  source 1..15: mol_type = other DNA
gttgttcatccttcc

SEQ ID NO: 2715 - DNA, 15 bp, synthetic construct
  source 1..15: mol_type = other DNA
gtcatgatttccagg

SEQ ID NO: 2716 - DNA, 15 bp, synthetic construct
  source 1..15: mol_type = other DNA
aataatgatgcccac

SEQ ID NO: 2717 - DNA, 15 bp, synthetic construct
  source 1..15: mol_type = other DNA
ttgcggaaaaggtgg

SEQ ID NO: 2718 - DNA, 15 bp, synthetic construct
  source 1..15: mol_type = other DNA
acagttacctctgga

SEQ ID NO: 2719 - DNA, 15 bp, synthetic construct
  source 1..15: mol_type = other DNA
ttagagtacggagca

SEQ ID NO: 2720 - DNA, 15 bp, synthetic construct
  source 1..15: mol_type = other DNA
atcgtccaaattctt

SEQ ID NO: 2721 - DNA, 15 bp, synthetic construct
  source 1..15: mol_type = other DNA
acgtcctcagttgag

SEQ ID NO: 2722 - DNA, 15 bp, synthetic construct
  source 1..15: mol_type = other DNA
ggctcatccaagccc

SEQ ID NO: 2723 - DNA, 15 bp, synthetic construct
  source 1..15: mol_type = other DNA
ctgattggtcaggat

SEQ ID NO: 2724 - DNA, 15 bp, synthetic construct
  source 1..15: mol_type = other DNA
cagtagagctcggga

SEQ ID NO: 2725 - DNA, 15 bp, synthetic construct
  source 1..15: mol_type = other DNA
ggactccacttatgg

SEQ ID NO: 2726 - DNA, 15 bp, synthetic construct
  source 1..15: mol_type = other DNA
gcgcaatcccttgat

SEQ ID NO: 2727 - DNA, 15 bp, synthetic construct
  source 1..15: mol_type = other DNA
gatgatcacatgttc

SEQ ID NO: 2728 - DNA, 15 bp, synthetic construct
  source 1..15: mol_type = other DNA
gacattgaccactgg

SEQ ID NO: 2729 - DNA, 15 bp, synthetic construct
  source 1..15: mol_type = other DNA
actgaggtcaaggat

SEQ ID NO: 2730 - DNA, 15 bp, synthetic construct
  source 1..15: mol_type = other DNA
agacagactcctgta

SEQ ID NO: 2731 - DNA, 15 bp, synthetic construct
  source 1..15: mol_type = other DNA
tatgttggccaatgc

SEQ ID NO: 2732 - DNA, 15 bp, synthetic construct
  source 1..15: mol_type = other DNA
agccattaaagcaga

SEQ ID NO: 2733 - DNA, 15 bp, synthetic construct
  source 1..15: mol_type = other DNA
catcagcacagctat

SEQ ID NO: 2734 - DNA, 15 bp, synthetic construct
  source 1..15: mol_type = other DNA
acgttgggctctctc

SEQ ID NO: 2735 - DNA, 15 bp, synthetic construct
  source 1..15: mol_type = other DNA
cttcggctctgtctt

SEQ ID NO: 2736 - DNA, 15 bp, synthetic construct
  source 1..15: mol_type = other DNA
aacaaaacgcacccg

SEQ ID NO: 2737 - DNA, 15 bp, synthetic construct
  source 1..15: mol_type = other DNA
aataacggaacacag

SEQ ID NO: 2738 - DNA, 15 bp, synthetic construct
  source 1..15: mol_type = other DNA
ttgagaaggagacga

SEQ ID NO: 2739 - DNA, 15 bp, synthetic construct
  source 1..15: mol_type = other DNA
gcggaggacgtacca

SEQ ID NO: 2740 - DNA, 15 bp, synthetic construct
  source 1..15: mol_type = other DNA
cgtttcctctcaggg

SEQ ID NO: 2741 - DNA, 15 bp, synthetic construct
  source 1..15: mol_type = other DNA
acattccggagttgt

SEQ ID NO: 2742 - DNA, 15 bp, synthetic construct
  source 1..15: mol_type = other DNA
aagtcagcgtgacgg

SEQ ID NO: 2743 - DNA, 15 bp, synthetic construct
  source 1..15: mol_type = other DNA
cggcgaacagaacaa

SEQ ID NO: 2744 - DNA, 15 bp, synthetic construct
  source 1..15: mol_type = other DNA
aaaacgaaagcaagt

SEQ ID NO: 2745 - DNA, 15 bp, synthetic construct
  source 1..15: mol_type = other DNA
ggcgatttgccagag

SEQ ID NO: 2746 - DNA, 15 bp, synthetic construct
  source 1..15: mol_type = other DNA
aacttcgcgggctcc

SEQ ID NO: 2747 - DNA, 15 bp, synthetic construct
  source 1..15: mol_type = other DNA
tcttcttttcctggt

SEQ ID NO: 2748 - DNA, 15 bp, synthetic construct
  source 1..15: mol_type = other DNA
aaataggtggtgtcc

SEQ ID NO: 2749 - DNA, 15 bp, synthetic construct
  source 1..15: mol_type = other DNA
acccttccataggac

SEQ ID NO: 2750 - DNA, 15 bp, synthetic construct
  source 1..15: mol_type = other DNA
tattaccactggacg

SEQ ID NO: 2751 - DNA, 15 bp, synthetic construct
  source 1..15: mol_type = other DNA
tgtcttcctcttcgt

SEQ ID NO: 2752 - DNA, 15 bp, synthetic construct
  source 1..15: mol_type = other DNA
atcactagctcagac

SEQ ID NO: 2753 - DNA, 15 bp, synthetic construct
  source 1..15: mol_type = other DNA
tctcggtgagggcta

SEQ ID NO: 2754 - DNA, 15 bp, synthetic construct
  source 1..15: mol_type = other DNA
agcgggttcacgaag

SEQ ID NO: 2755 - DNA, 15 bp, synthetic construct
  source 1..15: mol_type = other DNA
agcgatttcaggcga

SEQ ID NO: 2756 - DNA, 15 bp, synthetic construct
  source 1..15: mol_type = other DNA
aatttgtccttgttg

SEQ ID NO: 2757 - DNA, 15 bp, synthetic construct
  source 1..15: mol_type = other DNA
cctctcaaagcacag

SEQ ID NO: 2758 - DNA, 15 bp, synthetic construct
  source 1..15: mol_type = other DNA
gattgatggcctcgc

SEQ ID NO: 2759 - DNA, 15 bp, synthetic construct
  source 1..15: mol_type = other DNA
tgtcttccgactctt

SEQ ID NO: 2760 - DNA, 15 bp, synthetic construct
  source 1..15: mol_type = other DNA
gggccttttcttggt

SEQ ID NO: 2761 - DNA, 15 bp, synthetic construct
  source 1..15: mol_type = other DNA
ttttctgtgcctacg

SEQ ID NO: 2762 - DNA, 15 bp, synthetic construct
  source 1..15: mol_type = other DNA
agtctacttcttcca

SEQ ID NO: 2763 - DNA, 15 bp, synthetic construct
  source 1..15: mol_type = other DNA
gcgcgggtattcagc

SEQ ID NO: 2764 - DNA, 15 bp, synthetic construct
  source 1..15: mol_type = other DNA
ctgtggagagatcct

SEQ ID NO: 2765 - DNA, 15 bp, synthetic construct
  source 1..15: mol_type = other DNA
acttctttatcacgt

SEQ ID NO: 2766 - DNA, 15 bp, synthetic construct
  source 1..15: mol_type = other DNA
ggtctgagttatttt

SEQ ID NO: 2767 - DNA, 15 bp, synthetic construct
  source 1..15: mol_type = other DNA
agagttctaagcatt

SEQ ID NO: 2768 - DNA, 15 bp, synthetic construct
  source 1..15: mol_type = other DNA
aatgtgactcgagca

SEQ ID NO: 2769 - DNA, 15 bp, synthetic construct
  source 1..15: mol_type = other DNA
ccaatctgtgaaaat

SEQ ID NO: 2770 - DNA, 15 bp, synthetic construct
  source 1..15: mol_type = other DNA
catccagatactccc

SEQ ID NO: 2771 - DNA, 15 bp, synthetic construct
  source 1..15: mol_type = other DNA
acagccacaccggga

SEQ ID NO: 2772 - DNA, 15 bp, synthetic construct
  source 1..15: mol_type = other DNA
ctgctttagtgccta

SEQ ID NO: 2773 - DNA, 15 bp, synthetic construct
  source 1..15: mol_type = other DNA
ggcatccggcttgac

SEQ ID NO: 2774 - DNA, 15 bp, synthetic construct
  source 1..15: mol_type = other DNA
ggtggatccagacac

SEQ ID NO: 2775 - DNA, 15 bp, synthetic construct
  source 1..15: mol_type = other DNA
ccactagctgaagcc

SEQ ID NO: 2776 - DNA, 15 bp, synthetic construct
  source 1..15: mol_type = other DNA
aactcatggacgcag

SEQ ID NO: 2777 - DNA, 15 bp, synthetic construct
  source 1..15: mol_type = other DNA
tcaacccttggagca

SEQ ID NO: 2778 - DNA, 15 bp, synthetic construct
  source 1..15: mol_type = other DNA
tttgctcctccaaac

SEQ ID NO: 2779 - DNA, 15 bp, synthetic construct
  source 1..15: mol_type = other DNA
ctagcgcctcatgtt

SEQ ID NO: 2780 - DNA, 15 bp, synthetic construct
  source 1..15: mol_type = other DNA
tataaatggctgcag

SEQ ID NO: 2781 - DNA, 15 bp, synthetic construct
  source 1..15: mol_type = other DNA
ttgtcaactacaggg

SEQ ID NO: 2782 - DNA, 15 bp, synthetic construct
  source 1..15: mol_type = other DNA
atagtgctcctctat

SEQ ID NO: 2783 - DNA, 15 bp, synthetic construct
  source 1..15: mol_type = other DNA
ccactttttgacaaa

SEQ ID NO: 2784 - DNA, 15 bp, synthetic construct
  source 1..15: mol_type = other DNA
gcaggtcatctttgt

SEQ ID NO: 2785 - DNA, 15 bp, synthetic construct
  source 1..15: mol_type = other DNA
ccgaaaagtctccac

SEQ ID NO: 2786 - DNA, 15 bp, synthetic construct
  source 1..15: mol_type = other DNA
gcaacaacatgttca

SEQ ID NO: 2787 - DNA, 15 bp, synthetic construct
  source 1..15: mol_type = other DNA
gcctttcctgtcgct

SEQ ID NO: 2788 - DNA, 15 bp, synthetic construct
  source 1..15: mol_type = other DNA
tgagcctgtctgggc

SEQ ID NO: 2789 - DNA, 15 bp, synthetic construct
  source 1..15: mol_type = other DNA
tgcaaatatggctgc

SEQ ID NO: 2790 - DNA, 15 bp, synthetic construct
  source 1..15: mol_type = other DNA
caagagattgcatct

SEQ ID NO: 2791 - DNA, 15 bp, synthetic construct
  source 1..15: mol_type = other DNA
taagtccagacaggt

SEQ ID NO: 2792 - DNA, 15 bp, synthetic construct
  source 1..15: mol_type = other DNA
tctagctgccagagt

SEQ ID NO: 2793 - DNA, 15 bp, synthetic construct
  source 1..15: mol_type = other DNA
cgtcacaatgacctg

SEQ ID NO: 2794 - DNA, 15 bp, synthetic construct
  source 1..15: mol_type = other DNA
gcggttcaccgtcag

SEQ ID NO: 2795 - DNA, 15 bp, synthetic construct
  source 1..15: mol_type = other DNA
atcctgtaagtccca

SEQ ID NO: 2796 - DNA, 15 bp, synthetic construct
  source 1..15: mol_type = other DNA
ttccttgcgctggtt

SEQ ID NO: 2797 - DNA, 15 bp, synthetic construct
  source 1..15: mol_type = other DNA
tcatgcattgagcaa

SEQ ID NO: 2798 - DNA, 15 bp, synthetic construct
  source 1..15: mol_type = other DNA
ggtctggatcaagct

SEQ ID NO: 2799 - DNA, 15 bp, synthetic construct
  source 1..15: mol_type = other DNA
agcgtcagccgaagg

SEQ ID NO: 2800 - DNA, 15 bp, synthetic construct
  source 1..15: mol_type = other DNA
ctcgccctcttccaa

SEQ ID NO: 2801 - DNA, 15 bp, synthetic construct
  source 1..15: mol_type = other DNA
tagactcaagttcac

SEQ ID NO: 2802 - DNA, 15 bp, synthetic construct
  source 1..15: mol_type = other DNA
tatcttggaaacctt

SEQ ID NO: 2803 - DNA, 15 bp, synthetic construct
  source 1..15: mol_type = other DNA
cctgcttcgtctccc

SEQ ID NO: 2804 - DNA, 15 bp, synthetic construct
  source 1..15: mol_type = other DNA
gaaagaacagaaagc

SEQ ID NO: 2805 - DNA, 15 bp, synthetic construct
  source 1..15: mol_type = other DNA
cggtagcccagtgac

SEQ ID NO: 2806 - DNA, 15 bp, synthetic construct
  source 1..15: mol_type = other DNA
gtactgactggattc

SEQ ID NO: 2807 - DNA, 15 bp, synthetic construct
  source 1..15: mol_type = other DNA
cgagggacattgttc

SEQ ID NO: 2808 - DNA, 15 bp, synthetic construct
  source 1..15: mol_type = other DNA
tattgatccagtaca

SEQ ID NO: 2809 - DNA, 15 bp, synthetic construct
  source 1..15: mol_type = other DNA
tcagaccggtgagcc

SEQ ID NO: 2810 - DNA, 15 bp, synthetic construct
  source 1..15: mol_type = other DNA
gaggcatcggtccct

SEQ ID NO: 2811 - DNA, 15 bp, synthetic construct
  source 1..15: mol_type = other DNA
gctcaacaccaggca

SEQ ID NO: 2812 - DNA, 15 bp, synthetic construct
  source 1..15: mol_type = other DNA
caaaaatggccactc

SEQ ID NO: 2813 - DNA, 15 bp, synthetic construct
  source 1..15: mol_type = other DNA
gatcattgctgaggt

SEQ ID NO: 2814 - DNA, 15 bp, synthetic construct
  source 1..15: mol_type = other DNA
tctctccgatgtcat

SEQ ID NO: 2815 - DNA, 15 bp, synthetic construct
  source 1..15: mol_type = other DNA
acgcttttgaaaggg

SEQ ID NO: 2816 - DNA, 15 bp, synthetic construct
  source 1..15: mol_type = other DNA
cattctgcagagcct

SEQ ID NO: 2817 - DNA, 15 bp, synthetic construct
  source 1..15: mol_type = other DNA
cgtttggtgcatccg

SEQ ID NO: 2818 - DNA, 15 bp, synthetic construct
  source 1..15: mol_type = other DNA
gtcagtcacgagagc

SEQ ID NO: 2819 - DNA, 15 bp, synthetic construct
  source 1..15: mol_type = other DNA
tcactggtttgccaa

SEQ ID NO: 2820 - DNA, 15 bp, synthetic construct
  source 1..15: mol_type = other DNA
gcagaagcacgttct

SEQ ID NO: 2821 - DNA, 15 bp, synthetic construct
  source 1..15: mol_type = other DNA
aaccagcatggcagg

SEQ ID NO: 2822 - DNA, 15 bp, synthetic construct
  source 1..15: mol_type = other DNA
acctcaacgctcaaa

SEQ ID NO: 2823 - DNA, 15 bp, synthetic construct
  source 1..15: mol_type = other DNA
ggagctgttctgtgg

SEQ ID NO: 2824 - DNA, 15 bp, synthetic construct
  source 1..15: mol_type = other DNA
ggaacaacgcctcag

SEQ ID NO: 2825 - DNA, 15 bp, synthetic construct
  source 1..15: mol_type = other DNA
aaagtgcacaccagg

SEQ ID NO: 2826 - DNA, 15 bp, synthetic construct
  source 1..15: mol_type = other DNA
ctcggttccggtagc

SEQ ID NO: 2827 - DNA, 15 bp, synthetic construct
  source 1..15: mol_type = other DNA
ttctctgagaaagga

SEQ ID NO: 2828 - DNA, 15 bp, synthetic construct
  source 1..15: mol_type = other DNA
cttaatccgtgagtt

SEQ ID NO: 2829 - DNA, 15 bp, synthetic construct
  source 1..15: mol_type = other DNA
gcctgtctacagcaa

SEQ ID NO: 2830 - DNA, 15 bp, synthetic construct
  source 1..15: mol_type = other DNA
caggtgatgaattgg

SEQ ID NO: 2831 - DNA, 15 bp, synthetic construct
  source 1..15: mol_type = other DNA
ctggtattcacgctc

SEQ ID NO: 2832 - DNA, 15 bp, synthetic construct
  source 1..15: mol_type = other DNA
cttattcagccacac

SEQ ID NO: 2833 - DNA, 15 bp, synthetic construct
  source 1..15: mol_type = other DNA
ggcagtttacccacg

SEQ ID NO: 2834 - DNA, 15 bp, synthetic construct
  source 1..15: mol_type = other DNA
cccattggcggaagg

SEQ ID NO: 2835 - DNA, 15 bp, synthetic construct
  source 1..15: mol_type = other DNA
gcgcttccattggtg

SEQ ID NO: 2836 - DNA, 15 bp, synthetic construct
  source 1..15: mol_type = other DNA
tgcttagattgggca

SEQ ID NO: 2837 - DNA, 15 bp, synthetic construct
  source 1..15: mol_type = other DNA
aaacacatgcgcgcg

SEQ ID NO: 2838 - DNA, 15 bp, synthetic construct
  source 1..15: mol_type = other DNA
cacagctacacgggc

SEQ ID NO: 2839 - DNA, 15 bp, synthetic construct
  source 1..15: mol_type = other DNA
gcaggcaatcaccat

SEQ ID NO: 2840 - DNA, 15 bp, synthetic construct
  source 1..15: mol_type = other DNA
aagagaacaccctgg

SEQ ID NO: 2841 - DNA, 15 bp, synthetic construct
  source 1..15: mol_type = other DNA
gtaggcttgtgtcaa

SEQ ID NO: 2842 - DNA, 15 bp, synthetic construct
  source 1..15: mol_type = other DNA
ttcccgggttttgtt

SEQ ID NO: 2843 - DNA, 15 bp, synthetic construct
  source 1..15: mol_type = other DNA
gctcatcgggtcgtc

SEQ ID NO: 2844 - DNA, 15 bp, synthetic construct
  source 1..15: mol_type = other DNA
gggcatttaaaagtc

SEQ ID NO: 2845 - DNA, 15 bp, synthetic construct
  source 1..15: mol_type = other DNA
tcctaacggacctca

SEQ ID NO: 2846 - DNA, 15 bp, synthetic construct
  source 1..15: mol_type = other DNA
cttccgcgttcgcag

SEQ ID NO: 2847 - DNA, 15 bp, synthetic construct
  source 1..15: mol_type = other DNA
gtcctccttgtgaaa

SEQ ID NO: 2848 - DNA, 15 bp, synthetic construct
  source 1..15: mol_type = other DNA
tgaccgcgagggaag

SEQ ID NO: 2849 - DNA, 15 bp, synthetic construct
  source 1..15: mol_type = other DNA
catggtgggaatagt

SEQ ID NO: 2850 - DNA, 15 bp, synthetic construct
  source 1..15: mol_type = other DNA
tctctgccactatac

SEQ ID NO: 2851 - DNA, 15 bp, synthetic construct
  source 1..15: mol_type = other DNA
agaccgtctgatagc

SEQ ID NO: 2852 - DNA, 15 bp, synthetic construct
  source 1..15: mol_type = other DNA
ggcagtaaggaacag

SEQ ID NO: 2853 - DNA, 15 bp, synthetic construct
  source 1..15: mol_type = other DNA
ggctttctccaagca

SEQ ID NO: 2854 - DNA, 15 bp, synthetic construct
  source 1..15: mol_type = other DNA
tcaatgctgagcatg

SEQ ID NO: 2855 - DNA, 15 bp, synthetic construct
  source 1..15: mol_type = other DNA
ttagcaatgaacatc

SEQ ID NO: 2856 - DNA, 15 bp, synthetic construct
  source 1..15: mol_type = other DNA
ggccaaaactgttgg

SEQ ID NO: 2857 - DNA, 15 bp, synthetic construct
  source 1..15: mol_type = other DNA
aagctgtctggtcac

SEQ ID NO: 2858 - DNA, 15 bp, synthetic construct
  source 1..15: mol_type = other DNA
actctaatgagcaca

SEQ ID NO: 2859 - DNA, 15 bp, synthetic construct
  source 1..15: mol_type = other DNA
gaaggttcattgaaa

SEQ ID NO: 2860 - DNA, 15 bp, synthetic construct
  source 1..15: mol_type = other DNA
gctttggcctgcact

SEQ ID NO: 2861 - DNA, 15 bp, synthetic construct
  source 1..15: mol_type = other DNA
aaaagctcctatggg

SEQ ID NO: 2862 - DNA, 15 bp, synthetic construct
  source 1..15: mol_type = other DNA
tagttgctgccacag

SEQ ID NO: 2863 - DNA, 15 bp, synthetic construct
  source 1..15: mol_type = other DNA
agagcagagcagttt

SEQ ID NO: 2864 - DNA, 15 bp, synthetic construct
  source 1..15: mol_type = other DNA
aaaacaggtggccgg

SEQ ID NO: 2865 - DNA, 15 bp, synthetic construct
  source 1..15: mol_type = other DNA
tgccaagacacagtc

SEQ ID NO: 2866 - DNA, 15 bp, synthetic construct
  source 1..15: mol_type = other DNA
agatggtagctcctc

SEQ ID NO: 2867 - DNA, 15 bp, synthetic construct
  source 1..15: mol_type = other DNA
aaaccaagttgcccg

SEQ ID NO: 2868 - DNA, 15 bp, synthetic construct
  source 1..15: mol_type = other DNA
aaagtgtcccgttct

SEQ ID NO: 2869 - DNA, 15 bp, synthetic construct
  source 1..15: mol_type = other DNA
ttaggcttccacagt

SEQ ID NO: 2870 - DNA, 15 bp, synthetic construct
  source 1..15: mol_type = other DNA
agtctgtggttcact

SEQ ID NO: 2871 - DNA, 15 bp, synthetic construct
  source 1..15: mol_type = other DNA
tgatgcatcccagaa

SEQ ID NO: 2872 - DNA, 15 bp, synthetic construct
  source 1..15: mol_type = other DNA
ctgtgacttgtggtc

SEQ ID NO: 2873 - DNA, 15 bp, synthetic construct
  source 1..15: mol_type = other DNA
caaagcccacttctt

SEQ ID NO: 2874 - DNA, 15 bp, synthetic construct
  source 1..15: mol_type = other DNA
aacctgtgttatact

SEQ ID NO: 2875 - DNA, 15 bp, synthetic construct
  source 1..15: mol_type = other DNA
ggacttaactgatct

SEQ ID NO: 2876 - DNA, 15 bp, synthetic construct
  source 1..15: mol_type = other DNA
tggctgcctagttgg

SEQ ID NO: 2877 - DNA, 15 bp, synthetic construct
  source 1..15: mol_type = other DNA
atccgctacatctga

SEQ ID NO: 2878 - DNA, 15 bp, synthetic construct
  source 1..15: mol_type = other DNA
tgctttgcgttggac

SEQ ID NO: 2879 - DNA, 15 bp, synthetic construct
  source 1..15: mol_type = other DNA
actgggatgctcttc

SEQ ID NO: 2880 - DNA, 15 bp, synthetic construct
  source 1..15: mol_type = other DNA
acatagccttgccta

SEQ ID NO: 2881 - DNA, 15 bp, synthetic construct
  source 1..15: mol_type = other DNA
agaacccaaaacgat

SEQ ID NO: 2882 - DNA, 15 bp, synthetic construct
  source 1..15: mol_type = other DNA
tttggaagcaccagg

SEQ ID NO: 2883 - DNA, 15 bp, synthetic construct
  source 1..15: mol_type = other DNA
ttccttgatggtctc

SEQ ID NO: 2884 - DNA, 15 bp, synthetic construct
  source 1..15: mol_type = other DNA
attcaagttctgtct

SEQ ID NO: 2885 - DNA, 15 bp, synthetic construct
  source 1..15: mol_type = other DNA
tttcgcttccctgtt

SEQ ID NO: 2886 - DNA, 15 bp, synthetic construct
  source 1..15: mol_type = other DNA
ttcaaaccggcagta

SEQ ID NO: 2887 - DNA, 15 bp, synthetic construct
  source 1..15: mol_type = other DNA
acctaagagcaggtc

SEQ ID NO: 2888 - DNA, 15 bp, synthetic construct
  source 1..15: mol_type = other DNA
ggtgggtttacccgc

SEQ ID NO: 2889 - DNA, 15 bp, synthetic construct
  source 1..15: mol_type = other DNA
tgtgctatagaacag

SEQ ID NO: 2890 - DNA, 15 bp, synthetic construct
  source 1..15: mol_type = other DNA
gagttctggcaagca

SEQ ID NO: 2891 - DNA, 15 bp, synthetic construct
  source 1..15: mol_type = other DNA
ctaggcactgtgtgg

SEQ ID NO: 2892 - DNA, 15 bp, synthetic construct
  source 1..15: mol_type = other DNA
ctggtcacagcgaag

SEQ ID NO: 2893 - DNA, 15 bp, synthetic construct
  source 1..15: mol_type = other DNA
ccacttgagggcgtc

SEQ ID NO: 2894 - DNA, 15 bp, synthetic construct
  source 1..15: mol_type = other DNA
cccttcttccagtcc

SEQ ID NO: 2895 - DNA, 15 bp, synthetic construct
  source 1..15: mol_type = other DNA
tcttcccatggttcc

SEQ ID NO: 2896 - DNA, 15 bp, synthetic construct
  source 1..15: mol_type = other DNA
aggtacttctcgcgg

SEQ ID NO: 2897 - DNA, 15 bp, synthetic construct
  source 1..15: mol_type = other DNA
ggctgggattcgtgt

SEQ ID NO: 2898 - DNA, 15 bp, synthetic construct
  source 1..15: mol_type = other DNA
ctgtgtgaaggccag

SEQ ID NO: 2899 - DNA, 15 bp, synthetic construct
  source 1..15: mol_type = other DNA
tttgtatctcaggga

SEQ ID NO: 2900 - DNA, 15 bp, synthetic construct
  source 1..15: mol_type = other DNA
ccgctgtagaggagg

SEQ ID NO: 2901 - DNA, 15 bp, synthetic construct
  source 1..15: mol_type = other DNA
cctcacgctggtcct

SEQ ID NO: 2902 - DNA, 15 bp, synthetic construct
  source 1..15: mol_type = other DNA
gaacacatccggagc

SEQ ID NO: 2903 - DNA, 15 bp, synthetic construct
  source 1..15: mol_type = other DNA
ttcttactcttgctg

SEQ ID NO: 2904 - DNA, 15 bp, synthetic construct
  source 1..15: mol_type = other DNA
gttctgtggcggaca

SEQ ID NO: 2905 - DNA, 15 bp, synthetic construct
  source 1..15: mol_type = other DNA
ccagttatcaagcat

SEQ ID NO: 2906 - DNA, 15 bp, synthetic construct
  source 1..15: mol_type = other DNA
gacagggtggtccac

SEQ ID NO: 2907 - DNA, 15 bp, synthetic construct
  source 1..15: mol_type = other DNA
gtactcgccttggcg

SEQ ID NO: 2908 - DNA, 15 bp, synthetic construct
  source 1..15: mol_type = other DNA
tcgtgtagtcatcgc

SEQ ID NO: 2909 - DNA, 15 bp, synthetic construct
  source 1..15: mol_type = other DNA
caggtgacggaggtc

SEQ ID NO: 2910 - DNA, 15 bp, synthetic construct
  source 1..15: mol_type = other DNA
tgtactgctcctccc

SEQ ID NO: 2911 - DNA, 15 bp, synthetic construct
  source 1..15: mol_type = other DNA
tccttgggttttggg

SEQ ID NO: 2912 - DNA, 15 bp, synthetic construct
  source 1..15: mol_type = other DNA
ggactggagtgggtg

SEQ ID NO: 2913 - DNA, 15 bp, synthetic construct
  source 1..15: mol_type = other DNA
caggagttcacggga

SEQ ID NO: 2914 - DNA, 15 bp, synthetic construct
  source 1..15: mol_type = other DNA
gcctcatgcatcacg

SEQ ID NO: 2915 - DNA, 15 bp, synthetic construct
  source 1..15: mol_type = other DNA
tagttgttctccggc

SEQ ID NO: 2916 - DNA, 15 bp, synthetic construct
  source 1..15: mol_type = other DNA
catgctgggtgcctg

SEQ ID NO: 2917 - DNA, 15 bp, synthetic construct
  source 1..15: mol_type = other DNA
cacctccttcgagtg

SEQ ID NO: 2918 - DNA, 15 bp, synthetic construct
  source 1..15: mol_type = other DNA
acggtgagcttgctg

SEQ ID NO: 2919 - DNA, 15 bp, synthetic construct
  source 1..15: mol_type = other DNA
ttgcacttgtactcc

SEQ ID NO: 2920 - DNA, 15 bp, synthetic construct
  source 1..15: mol_type = other DNA
gggatagaagccttt

SEQ ID NO: 2921 - DNA, 15 bp, synthetic construct
  source 1..15: mol_type = other DNA
gcaccctctttgtcg

SEQ ID NO: 2922 - DNA, 15 bp, synthetic construct
  source 1..15: mol_type = other DNA
tgcagatgtaggtct

SEQ ID NO: 2923 - DNA, 15 bp, synthetic construct
  source 1..15: mol_type = other DNA
cattatgcacctcca

SEQ ID NO: 2924 - DNA, 15 bp, synthetic construct
  source 1..15: mol_type = other DNA
aaaccacgcctgtgt

SEQ ID NO: 2925 - DNA, 15 bp, synthetic construct
  source 1..15: mol_type = other DNA
gtacgtgccaagcat

SEQ ID NO: 2926 - DNA, 15 bp, synthetic construct
  source 1..15: mol_type = other DNA
cttaacaggaagagt

SEQ ID NO: 2927 - DNA, 15 bp, synthetic construct
  source 1..15: mol_type = other DNA
tcgtccacagcccgt

SEQ ID NO: 2928 - DNA, 15 bp, synthetic construct
  source 1..15: mol_type = other DNA
tcgcagctctcggaa

SEQ ID NO: 2929 - DNA, 15 bp, synthetic construct
  source 1..15: mol_type = other DNA
ccgagaatccagcag

SEQ ID NO: 2930 - DNA, 15 bp, synthetic construct
  source 1..15: mol_type = other DNA
accgtcaccggttcg

SEQ ID NO: 2931 - DNA, 15 bp, synthetic construct
  source 1..15: mol_type = other DNA
cagggtcttcgtggc

SEQ ID NO: 2932 - DNA, 15 bp, synthetic construct
  source 1..15: mol_type = other DNA
tgcgtgacagtcacg

SEQ ID NO: 2933 - DNA, 15 bp, synthetic construct
  source 1..15: mol_type = other DNA
ggagacagggagagg

SEQ ID NO: 2934 - DNA, 15 bp, synthetic construct
  source 1..15: mol_type = other DNA
tcaggtctgtgacca

SEQ ID NO: 2935 - DNA, 15 bp, synthetic construct
  source 1..15: mol_type = other DNA
tggtactgtagaaga

SEQ ID NO: 2936 - DNA, 15 bp, synthetic construct
  source 1..15: mol_type = other DNA
agcaaagcagtgtgg

SEQ ID NO: 2937 - DNA, 15 bp, synthetic construct
  source 1..15: mol_type = other DNA
tgttcttgtatttcc

SEQ ID NO: 2938 - DNA, 15 bp, synthetic construct
  source 1..15: mol_type = other DNA
ggttttcacagcttc

SEQ ID NO: 2939 - DNA, 15 bp, synthetic construct
  source 1..15: mol_type = other DNA
acacggtcaggatgc

SEQ ID NO: 2940 - DNA, 15 bp, synthetic construct
  source 1..15: mol_type = other DNA
gactgaaacccgtgg

SEQ ID NO: 2941 - DNA, 15 bp, synthetic construct
  source 1..15: mol_type = other DNA
atcctcgcagatgct

SEQ ID NO: 2942 - DNA, 15 bp, synthetic construct
  source 1..15: mol_type = other DNA
ttaccggtggacttg

SEQ ID NO: 2943 - DNA, 15 bp, synthetic construct
  source 1..15: mol_type = other DNA
cacgtgttcgtctgt

SEQ ID NO: 2944 - DNA, 15 bp, synthetic construct
  source 1..15: mol_type = other DNA
ggaattctcacagga

SEQ ID NO: 2945 - DNA, 15 bp, synthetic construct
  source 1..15: mol_type = other DNA
aacaggccacgcagg

SEQ ID NO: 2946 - DNA, 15 bp, synthetic construct
  source 1..15: mol_type = other DNA
gggttgccgaagaag

SEQ ID NO: 2947 - DNA, 15 bp, synthetic construct
  source 1..15: mol_type = other DNA
gaaggaagtcctgtg

SEQ ID NO: 2948 - DNA, 15 bp, synthetic construct
  source 1..15: mol_type = other DNA
ctgtgtgagagcaca

SEQ ID NO: 2949 - DNA, 15 bp, synthetic construct
  source 1..15: mol_type = other DNA
tgatggtcagtgtgc

SEQ ID NO: 2950 - DNA, 15 bp, synthetic construct
  source 1..15: mol_type = other DNA
ttttctttgttgccg

SEQ ID NO: 2951 - DNA, 15 bp, synthetic construct
  source 1..15: mol_type = other DNA
agtttgcatgcacac

SEQ ID NO: 2952 - DNA, 15 bp, synthetic construct
  source 1..15: mol_type = other DNA
agcttggttctagcg

SEQ ID NO: 2953 - DNA, 15 bp, synthetic construct
  source 1..15: mol_type = other DNA
caactgagaatttgg

SEQ ID NO: 2954 - DNA, 15 bp, synthetic construct
  source 1..15: mol_type = other DNA
tagtcaggtagtgct

SEQ ID NO: 2955 - DNA, 15 bp, synthetic construct
  source 1..15: mol_type = other DNA
ggaaacagcttaaaa

SEQ ID NO: 2956 - DNA, 15 bp, synthetic construct
  source 1..15: mol_type = other DNA
tcttcagatatctgg

SEQ ID NO: 2957 - DNA, 15 bp, synthetic construct
  source 1..15: mol_type = other DNA
caacccaggtaaccc

SEQ ID NO: 2958 - DNA, 15 bp, synthetic construct
  source 1..15: mol_type = other DNA
ttcacagagaagctc

SEQ ID NO: 2959 - DNA, 15 bp, synthetic construct
  source 1..15: mol_type = other DNA
tcagactgggtgccc

SEQ ID NO: 2960 - DNA, 15 bp, synthetic construct
  source 1..15: mol_type = other DNA
catctcagacaaggc

SEQ ID NO: 2961 - DNA, 15 bp, synthetic construct
  source 1..15: mol_type = other DNA
agctagaaagcgtgg

SEQ ID NO: 2962 - DNA, 15 bp, synthetic construct
  source 1..15: mol_type = other DNA
ggcagtcaccttagg

SEQ ID NO: 2963 - DNA, 15 bp, synthetic construct
  source 1..15: mol_type = other DNA
aatgaaaccttggat

SEQ ID NO: 2964 - DNA, 15 bp, synthetic construct
  source 1..15: mol_type = other DNA
ttgatgtctgggtct

SEQ ID NO: 2965 - DNA, 15 bp, synthetic construct
  source 1..15: mol_type = other DNA
ttgcaagtctgtctt

SEQ ID NO: 2966 - DNA, 15 bp, synthetic construct
  source 1..15: mol_type = other DNA
ctaggtcacagtgac

SEQ ID NO: 2967 - DNA, 15 bp, synthetic construct
  source 1..15: mol_type = other DNA
ccctgatgtgtagac

SEQ ID NO: 2968 - DNA, 15 bp, synthetic construct
  source 1..15: mol_type = other DNA
taagggttctgtctg

SEQ ID NO: 2969 - DNA, 15 bp, synthetic construct
  source 1..15: mol_type = other DNA
agagattggcggagg

SEQ ID NO: 2970 - DNA, 15 bp, synthetic construct
  source 1..15: mol_type = other DNA
gaaggtgaattaatc

SEQ ID NO: 2971 - DNA, 15 bp, synthetic construct
  source 1..15: mol_type = other DNA
agtcgccaccctgat

SEQ ID NO: 2972 - DNA, 15 bp, synthetic construct
  source 1..15: mol_type = other DNA
cctttaacaacaagt

SEQ ID NO: 2973 - DNA, 15 bp, synthetic construct
  source 1..15: mol_type = other DNA
catctcggagatctc

SEQ ID NO: 2974 - DNA, 15 bp, synthetic construct
  source 1..15: mol_type = other DNA
ggaatgaggttaggg

SEQ ID NO: 2975 - DNA, 15 bp, synthetic construct
  source 1..15: mol_type = other DNA
gtcacaggatgtgtt

SEQ ID NO: 2976 - DNA, 15 bp, synthetic construct
  source 1..15: mol_type = other DNA
ggcgccgcacataca

SEQ ID NO: 2977 - DNA, 15 bp, synthetic construct
  source 1..15: mol_type = other DNA
gctcctgagatatcc

SEQ ID NO: 2978 - DNA, 15 bp, synthetic construct
  source 1..15: mol_type = other DNA
acgaattagacaagt

SEQ ID NO: 2979 - DNA, 15 bp, synthetic construct
  source 1..15: mol_type = other DNA
tggatggtgtcttgg

SEQ ID NO: 2980 - DNA, 15 bp, synthetic construct
  source 1..15: mol_type = other DNA
cacctggacacagaa

SEQ ID NO: 2981 - DNA, 15 bp, synthetic construct
  source 1..15: mol_type = other DNA
atgacgttggtcacg

SEQ ID NO: 2982 - DNA, 15 bp, synthetic construct
  source 1..15: mol_type = other DNA
ggccatcttgggcct

SEQ ID NO: 2983 - DNA, 15 bp, synthetic construct
  source 1..15: mol_type = other DNA
catgacaccatggac

SEQ ID NO: 2984 - DNA, 15 bp, synthetic construct
  source 1..15: mol_type = other DNA
aggtactttcagact

SEQ ID NO: 2985 - DNA, 15 bp, synthetic construct
  source 1..15: mol_type = other DNA
attgtggatctctag

SEQ ID NO: 2986 - DNA, 15 bp, synthetic construct
  source 1..15: mol_type = other DNA
ccagttggagtgccg

SEQ ID NO: 2987 - DNA, 15 bp, synthetic construct
  source 1..15: mol_type = other DNA
gcctttgtttgaagg

SEQ ID NO: 2988 - DNA, 15 bp, synthetic construct
  source 1..15: mol_type = other DNA
caaaatcacacagct

SEQ ID NO: 2989 - DNA, 15 bp, synthetic construct
  source 1..15: mol_type = other DNA
gcacggcagcatcct

SEQ ID NO: 2990 - DNA, 15 bp, synthetic construct
  source 1..15: mol_type = other DNA
tgaagatgctttcat

SEQ ID NO: 2991 - DNA, 15 bp, synthetic construct
  source 1..15: mol_type = other DNA
ctggcataagaaaca

SEQ ID NO: 2992 - DNA, 15 bp, synthetic construct
  source 1..15: mol_type = other DNA
attctgcttcaaacc

SEQ ID NO: 2993 - DNA, 15 bp, synthetic construct
  source 1..15: mol_type = other DNA
caccttgcgaatggc

SEQ ID NO: 2994 - DNA, 15 bp, synthetic construct
  source 1..15: mol_type = other DNA
caaatagcccttggc

SEQ ID NO: 2995 - DNA, 15 bp, synthetic construct
  source 1..15: mol_type = other DNA
gctggttccactgtc

SEQ ID NO: 2996 - DNA, 15 bp, synthetic construct
  source 1..15: mol_type = other DNA
gtcataggacagggt

SEQ ID NO: 2997 - DNA, 15 bp, synthetic construct
  source 1..15: mol_type = other DNA
ccaggactctattcc

SEQ ID NO: 2998 - DNA, 15 bp, synthetic construct
  source 1..15: mol_type = other DNA
agtcaatgccactgt

SEQ ID NO: 2999 - DNA, 15 bp, synthetic construct
  source 1..15: mol_type = other DNA
cgattcttcctccag

SEQ ID NO: 3000 - DNA, 15 bp, synthetic construct
  source 1..15: mol_type = other DNA
ccatcacagtccggg

SEQ ID NO: 3001 - DNA, 15 bp, synthetic construct
  source 1..15: mol_type = other DNA
aagcctgagtctagg

SEQ ID NO: 3002 - DNA, 15 bp, synthetic construct
  source 1..15: mol_type = other DNA
tggtagtccacgttc

SEQ ID NO: 3003 - DNA, 15 bp, synthetic construct
  source 1..15: mol_type = other DNA
ttcttggaaagaggg

SEQ ID NO: 3004 - DNA, 15 bp, synthetic construct
  source 1..15: mol_type = other DNA
attgtgattcctgcc

SEQ ID NO: 3005 - DNA, 15 bp, synthetic construct
  source 1..15: mol_type = other DNA
ggatatctctcaggg

SEQ ID NO: 3006 - DNA, 15 bp, synthetic construct
  source 1..15: mol_type = other DNA
ttggctaatagtatg

SEQ ID NO: 3007 - DNA, 15 bp, synthetic construct
  source 1..15: mol_type = other DNA
caggagtcatcgttg

SEQ ID NO: 3008 - DNA, 15 bp, synthetic construct
  source 1..15: mol_type = other DNA
aagaactctaatgag

SEQ ID NO: 3009 - DNA, 15 bp, synthetic construct
  source 1..15: mol_type = other DNA
gtgacacaggtgcag

SEQ ID NO: 3010 - DNA, 15 bp, synthetic construct
  source 1..15: mol_type = other DNA
tgctatgagatggac

SEQ ID NO: 3011 - DNA, 15 bp, synthetic construct
  source 1..15: mol_type = other DNA
atttgctctattcct

SEQ ID NO: 3012 - DNA, 15 bp, synthetic construct
  source 1..15: mol_type = other DNA
ggccaagtgttacct

SEQ ID NO: 3013 - DNA, 15 bp, synthetic construct
  source 1..15: mol_type = other DNA
gtaatctgaggacct

SEQ ID NO: 3014 - DNA, 15 bp, synthetic construct
  source 1..15: mol_type = other DNA
tgaggaagagaaaaa

SEQ ID NO: 3015 - DNA, 15 bp, synthetic construct
  source 1..15: mol_type = other DNA
tgggtatttccaggt

SEQ ID NO: 3016 - DNA, 15 bp, synthetic construct
  source 1..15: mol_type = other DNA
ttgaaggcatgtgaa

SEQ ID NO: 3017 - DNA, 15 bp, synthetic construct
  source 1..15: mol_type = other DNA
atagggaagagctga

SEQ ID NO: 3018 - DNA, 15 bp, synthetic construct
  source 1..15: mol_type = other DNA
ctcccagaacttctt

SEQ ID NO: 3019 - DNA, 15 bp, synthetic construct
  source 1..15: mol_type = other DNA
gctgaagagaatccc

SEQ ID NO: 3020 - DNA, 15 bp, synthetic construct
  source 1..15: mol_type = other DNA
gacatggagaacacc

SEQ ID NO: 3021 - DNA, 15 bp, synthetic construct
  source 1..15: mol_type = other DNA
gtatccattcccaga

SEQ ID NO: 3022 - DNA, 15 bp, synthetic construct
  source 1..15: mol_type = other DNA
agcctcgttatccca

SEQ ID NO: 3023 - DNA, 15 bp, synthetic construct
  source 1..15: mol_type = other DNA
catatggaccagaca

SEQ ID NO: 3024 - DNA, 15 bp, synthetic construct
  source 1..15: mol_type = other DNA
agtttctccctcgct

SEQ ID NO: 3025 - DNA, 15 bp, synthetic construct
  source 1..15: mol_type = other DNA
ttatattacacctgg

SEQ ID NO: 3026 - DNA, 15 bp, synthetic construct
  source 1..15: mol_type = other DNA
acaacaggaaagtcc

SEQ ID NO: 3027 - DNA, 15 bp, synthetic construct
  source 1..15: mol_type = other DNA
gccatcagcttcaaa

SEQ ID NO: 3028 - DNA, 15 bp, synthetic construct
  source 1..15: mol_type = other DNA
gaagtcctttgggtc

SEQ ID NO: 3029 - DNA, 15 bp, synthetic construct
  source 1..15: mol_type = other DNA
ccttagcacctagtt

SEQ ID NO: 3030 - DNA, 15 bp, synthetic construct
  source 1..15: mol_type = other DNA
cagacatcaccaagc

SEQ ID NO: 3031 - DNA, 15 bp, synthetic construct
  source 1..15: mol_type = other DNA
ggatgccgccatcca

SEQ ID NO: 3032 - DNA, 15 bp, synthetic construct
  source 1..15: mol_type = other DNA
atttcactggcgagc

SEQ ID NO: 3033 - DNA, 15 bp, synthetic construct
  source 1..15: mol_type = other DNA
ctgctacttcttgcc

SEQ ID NO: 3034 - DNA, 15 bp, synthetic construct
  source 1..15: mol_type = other DNA
cgggctttaagtgag

SEQ ID NO: 3035 - DNA, 15 bp, synthetic construct
  source 1..15: mol_type = other DNA
ctttcaacacgcagg

SEQ ID NO: 3036 - DNA, 15 bp, synthetic construct
  source 1..15: mol_type = other DNA
cctcgaagaggtttg

SEQ ID NO: 3037 - DNA, 15 bp, synthetic construct
  source 1..15: mol_type = other DNA
gtgatcgtacaggtg

SEQ ID NO: 3038 - DNA, 15 bp, synthetic construct
  source 1..15: mol_type = other DNA
ttctgcttgagaggt

SEQ ID NO: 3039 - DNA, 15 bp, synthetic construct
  source 1..15: mol_type = other DNA
cacaacaactgacgc

SEQ ID NO: 3040 - DNA, 15 bp, synthetic construct
  source 1..15: mol_type = other DNA
tgtgtaaaaaggaga

SEQ ID NO: 3041 - DNA, 15 bp, synthetic construct
  source 1..15: mol_type = other DNA
cactaccctaaggca

SEQ ID NO: 3042 - DNA, 15 bp, synthetic construct
  source 1..15: mol_type = other DNA
atgacagagggtttc

SEQ ID NO: 3043 - DNA, 15 bp, synthetic construct
  source 1..15: mol_type = other DNA
atccatcttcctgac

SEQ ID NO: 3044 - DNA, 15 bp, synthetic construct
  source 1..15: mol_type = other DNA
agtattgggctggcg

SEQ ID NO: 3045 - DNA, 15 bp, synthetic construct
  source 1..15: mol_type = other DNA
tgtttcgttgtgttc

SEQ ID NO: 3046 - DNA, 15 bp, synthetic construct
  source 1..15: mol_type = other DNA
gtttgtatgtggttg

SEQ ID NO: 3047 - DNA, 15 bp, synthetic construct
  source 1..15: mol_type = other DNA
gcaggaagtctcact

SEQ ID NO: 3048 - DNA, 15 bp, synthetic construct
  source 1..15: mol_type = other DNA
tttgcatttctgtgg

SEQ ID NO: 3049 - DNA, 15 bp, synthetic construct
  source 1..15: mol_type = other DNA
atccagtctctatcg

SEQ ID NO: 3050 - DNA, 15 bp, synthetic construct
  source 1..15: mol_type = other DNA
tagggtagagtgtgt

SEQ ID NO: 3051 - DNA, 15 bp, synthetic construct
  source 1..15: mol_type = other DNA
gcagacgctctcagc

SEQ ID NO: 3052 - DNA, 15 bp, synthetic construct
  source 1..15: mol_type = other DNA
aggaaaacacagccg

SEQ ID NO: 3053 - DNA, 15 bp, synthetic construct
  source 1..15: mol_type = other DNA
tgggatctctggcgg

SEQ ID NO: 3054 - DNA, 15 bp, synthetic construct
  source 1..15: mol_type = other DNA
aacgggagaatcagc

SEQ ID NO: 3055 - DNA, 15 bp, synthetic construct
  source 1..15: mol_type = other DNA
gtctccatggttgca

SEQ ID NO: 3056 - DNA, 15 bp, synthetic construct
  source 1..15: mol_type = other DNA
ctgtatccctggacg

SEQ ID NO: 3057 - DNA, 15 bp, synthetic construct
  source 1..15: mol_type = other DNA
tacagagcatataga

SEQ ID NO: 3058 - DNA, 15 bp, synthetic construct
  source 1..15: mol_type = other DNA
agtgtgttcctggaa

SEQ ID NO: 3059 - DNA, 15 bp, synthetic construct
  source 1..15: mol_type = other DNA
ctgcggaaacctctc

SEQ ID NO: 3060 - DNA, 15 bp, synthetic construct
  source 1..15: mol_type = other DNA
tccttccttgtaggc

SEQ ID NO: 3061 - DNA, 15 bp, synthetic construct
  source 1..15: mol_type = other DNA
tttttttcgtgggag

SEQ ID NO: 3062 - DNA, 15 bp, synthetic construct
  source 1..15: mol_type = other DNA
cttgtctttttttcc

SEQ ID NO: 3063 - DNA, 15 bp, synthetic construct
  source 1..15: mol_type = other DNA
tggttgtcccaggac

SEQ ID NO: 3064 - DNA, 15 bp, synthetic construct
  source 1..15: mol_type = other DNA
aattctctctgtggc

SEQ ID NO: 3065 - DNA, 15 bp, synthetic construct
  source 1..15: mol_type = other DNA
gggagatcttgcacc

SEQ ID NO: 3066 - DNA, 15 bp, synthetic construct
  source 1..15: mol_type = other DNA
ttgatttgcaccttg

SEQ ID NO: 3067 - DNA, 15 bp, synthetic construct
  source 1..15: mol_type = other DNA
tctttcaaagtagtg

SEQ ID NO: 3068 - DNA, 15 bp, synthetic construct
  source 1..15: mol_type = other DNA
agttgtagaagcatg

SEQ ID NO: 3069 - DNA, 15 bp, synthetic construct
  source 1..15: mol_type = other DNA
gagaacagaagaaga

SEQ ID NO: 3070 - DNA, 15 bp, synthetic construct
  source 1..15: mol_type = other DNA
aaatggtcagcagcc

SEQ ID NO: 3071 - DNA, 15 bp, synthetic construct
  source 1..15: mol_type = other DNA
gcatctgtgggtctc

SEQ ID NO: 3072 - DNA, 15 bp, synthetic construct
  source 1..15: mol_type = other DNA
aattcgttcatccag

SEQ ID NO: 3073 - DNA, 15 bp, synthetic construct
  source 1..15: mol_type = other DNA
caccgcctttcatgg

SEQ ID NO: 3074 - DNA, 15 bp, synthetic construct
  source 1..15: mol_type = other DNA
gcttgtctacctttc

SEQ ID NO: 3075 - DNA, 15 bp, synthetic construct
  source 1..15: mol_type = other DNA
ctgtggtcagtttct

SEQ ID NO: 3076 - DNA, 15 bp, synthetic construct
  source 1..15: mol_type = other DNA
gtgaatagctgcagg

SEQ ID NO: 3077 - DNA, 15 bp, synthetic construct
  source 1..15: mol_type = other DNA
ccagaacacacagca

SEQ ID NO: 3078 - DNA, 15 bp, synthetic construct
  source 1..15: mol_type = other DNA
gacagagttgatctg

SEQ ID NO: 3079 - DNA, 15 bp, synthetic construct
  source 1..15: mol_type = other DNA
aagtacactaagatg

SEQ ID NO: 3080 - DNA, 15 bp, synthetic construct
  source 1..15: mol_type = other DNA
gtgaagccactgtgg

SEQ ID NO: 3081 - DNA, 15 bp, synthetic construct
  source 1..15: mol_type = other DNA
cttgacccgcacctg

SEQ ID NO: 3082 - DNA, 15 bp, synthetic construct
  source 1..15: mol_type = other DNA
ttacatcaggagccc

SEQ ID NO: 3083 - DNA, 15 bp, synthetic construct
  source 1..15: mol_type = other DNA
agggccctgaactcc

SEQ ID NO: 3084 - DNA, 15 bp, synthetic construct
  source 1..15: mol_type = other DNA
tttggaaagcacgct

SEQ ID NO: 3085 - DNA, 15 bp, synthetic construct
  source 1..15: mol_type = other DNA
agggacaagtaggca

SEQ ID NO: 3086 - DNA, 15 bp, synthetic construct
  source 1..15: mol_type = other DNA
gggtcgtaagtaaag

SEQ ID NO: 3087 - DNA, 15 bp, synthetic construct
  source 1..15: mol_type = other DNA
caccctccaaaggtc

SEQ ID NO: 3088 - DNA, 15 bp, synthetic construct
  source 1..15: mol_type = other DNA
tcccagttaggatga

SEQ ID NO: 3089 - DNA, 15 bp, synthetic construct
  source 1..15: mol_type = other DNA
tgtattgggaaccca

SEQ ID NO: 3090 - DNA, 15 bp, synthetic construct
  source 1..15: mol_type = other DNA
ggttggtgaagcagc

SEQ ID NO: 3091 - DNA, 15 bp, synthetic construct
  source 1..15: mol_type = other DNA
tcagccatctttgga

SEQ ID NO: 3092 - DNA, 15 bp, synthetic construct
  source 1..15: mol_type = other DNA
ttctgaagaggtgag

SEQ ID NO: 3093 - DNA, 15 bp, synthetic construct
  source 1..15: mol_type = other DNA
aatctgaggtgccca

SEQ ID NO: 3094 - DNA, 15 bp, synthetic construct
  source 1..15: mol_type = other DNA
acttttagttctcca

SEQ ID NO: 3095 - DNA, 15 bp, synthetic construct
  source 1..15: mol_type = other DNA
ctacggacgcaggca

SEQ ID NO: 3096 - DNA, 15 bp, synthetic construct
  source 1..15: mol_type = other DNA
cctatatttattggg

SEQ ID NO: 3097 - DNA, 15 bp, synthetic construct
  source 1..15: mol_type = other DNA
ggaagtggcattgca

SEQ ID NO: 3098 - DNA, 15 bp, synthetic construct
  source 1..15: mol_type = other DNA
tgaccagaagaagga

SEQ ID NO: 3099 - DNA, 15 bp, synthetic construct
  source 1..15: mol_type = other DNA
agttcatagctgggc

SEQ ID NO: 3100 - DNA, 15 bp, synthetic construct
  source 1..15: mol_type = other DNA
aatgatctggctctg

SEQ ID NO: 3101 - DNA, 15 bp, synthetic construct
  source 1..15: mol_type = other DNA
ctaggttgtccctcc

SEQ ID NO: 3102 - DNA, 15 bp, synthetic construct
  source 1..15: mol_type = other DNA
caccaaaacacttat

SEQ ID NO: 3103 - DNA, 15 bp, synthetic construct
  source 1..15: mol_type = other DNA
agtttgtgtttatcg

SEQ ID NO: 3104 - DNA, 15 bp, synthetic construct
  source 1..15: mol_type = other DNA
tgcgcagaatgagat

SEQ ID NO: 3105 - DNA, 15 bp, synthetic construct
  source 1..15: mol_type = other DNA
tgctttcacacatgt

SEQ ID NO: 3106 - DNA, 15 bp, synthetic construct
  source 1..15: mol_type = other DNA
ctttcgttcccggtg

SEQ ID NO: 3107 - DNA, 15 bp, synthetic construct
  source 1..15: mol_type = other DNA
aggaactggatcagg

SEQ ID NO: 3108 - DNA, 15 bp, synthetic construct
  source 1..15: mol_type = other DNA
ttcttattgggtcaa

SEQ ID NO: 3109 - DNA, 15 bp, synthetic construct
  source 1..15: mol_type = other DNA
atacctcaaactcca

SEQ ID NO: 3110 - DNA, 15 bp, synthetic construct
  source 1..15: mol_type = other DNA
actctcaaatctgtt

SEQ ID NO: 3111 - DNA, 15 bp, synthetic construct
  source 1..15: mol_type = other DNA
gtgtatccctggtat

SEQ ID NO: 3112 - DNA, 15 bp, synthetic construct
  source 1..15: mol_type = other DNA
acgacttgaagtaaa

SEQ ID NO: 3113 - DNA, 15 bp, synthetic construct
  source 1..15: mol_type = other DNA
aaatagtgatcaggg

SEQ ID NO: 3114 - DNA, 15 bp, synthetic construct
  source 1..15: mol_type = other DNA
ttgctgaggaaacgt

SEQ ID NO: 3115 - DNA, 15 bp, synthetic construct
  source 1..15: mol_type = other DNA
atgaatgagagtaag

SEQ ID NO: 3116 - DNA, 15 bp, synthetic construct
  source 1..15: mol_type = other DNA
gtaataacttggact

SEQ ID NO: 3117 - DNA, 15 bp, synthetic construct
  source 1..15: mol_type = other DNA
tgtgctggataaatt

SEQ ID NO: 3118 - DNA, 15 bp, synthetic construct
  source 1..15: mol_type = other DNA
ggcttttctgaagca

SEQ ID NO: 3119 - DNA, 15 bp, synthetic construct
  source 1..15: mol_type = other DNA
tctccaaccttcaca

SEQ ID NO: 3120 - DNA, 15 bp, synthetic construct
  source 1..15: mol_type = other DNA
ttcacacctaggctc

SEQ ID NO: 3121 - DNA, 15 bp, synthetic construct
  source 1..15: mol_type = other DNA
ggcaccagctatctt

SEQ ID NO: 3122 - DNA, 15 bp, synthetic construct
  source 1..15: mol_type = other DNA
aatgcaggtgtgcac

SEQ ID NO: 3123 - DNA, 15 bp, synthetic construct
  source 1..15: mol_type = other DNA
caggtcagtgagtgc

SEQ ID NO: 3124 - DNA, 15 bp, synthetic construct
  source 1..15: mol_type = other DNA
tccttcccgatagac

SEQ ID NO: 3125 - DNA, 15 bp, synthetic construct
  source 1..15: mol_type = other DNA
tacattgctgccggt

SEQ ID NO: 3126 - DNA, 15 bp, synthetic construct
  source 1..15: mol_type = other DNA
tgccactctggtcct

SEQ ID NO: 3127 - DNA, 15 bp, synthetic construct
  source 1..15: mol_type = other DNA
tcaggcactttacct

SEQ ID NO: 3128 - DNA, 15 bp, synthetic construct
  source 1..15: mol_type = other DNA
gagcctcaggtttaa

SEQ ID NO: 3129 - DNA, 15 bp, synthetic construct
  source 1..15: mol_type = other DNA
tttgtttagggcagg

SEQ ID NO: 3130 - DNA, 15 bp, synthetic construct
  source 1..15: mol_type = other DNA
taagttcagtctggg

SEQ ID NO: 3131 - DNA, 15 bp, synthetic construct
  source 1..15: mol_type = other DNA
acatcgtgcattaaa

SEQ ID NO: 3132 - DNA, 15 bp, synthetic construct
  source 1..15: mol_type = other DNA
ctgctcaagagagag

SEQ ID NO: 3133 - DNA, 15 bp, synthetic construct
  source 1..15: mol_type = other DNA
catgttgagtgccac

SEQ ID NO: 3134 - DNA, 15 bp, synthetic construct
  source 1..15: mol_type = other DNA
tactaagcagctctg

SEQ ID NO: 3135 - DNA, 15 bp, synthetic construct
  source 1..15: mol_type = other DNA
cttggaacagacctg

SEQ ID NO: 3136 - DNA, 15 bp, synthetic construct
  source 1..15: mol_type = other DNA
gcctcttctgatgca

SEQ ID NO: 3137 - DNA, 15 bp, synthetic construct
  source 1..15: mol_type = other DNA
ggttcacaaaggctg

SEQ ID NO: 3138 - DNA, 15 bp, synthetic construct
  source 1..15: mol_type = other DNA
atctctctcggtgca

SEQ ID NO: 3139 - DNA, 15 bp, synthetic construct
  source 1..15: mol_type = other DNA
gaagaagcctcgttc

SEQ ID NO: 3140 - DNA, 15 bp, synthetic construct
  source 1..15: mol_type = other DNA
gcagtagttctccag

SEQ ID NO: 3141 - DNA, 15 bp, synthetic construct
  source 1..15: mol_type = other DNA
cattgttccacaatg

SEQ ID NO: 3142 - DNA, 15 bp, synthetic construct
  source 1..15: mol_type = other DNA
atagacagaggtggg

SEQ ID NO: 3143 - DNA, 15 bp, synthetic construct
  source 1..15: mol_type = other DNA
gaaggtatcagggct

SEQ ID NO: 3144 - DNA, 15 bp, synthetic construct
  source 1..15: mol_type = other DNA
ctggacttcgacttt

SEQ ID NO: 3145 - DNA, 15 bp, synthetic construct
  source 1..15: mol_type = other DNA
ataagtccatcagtg

SEQ ID NO: 3146 - DNA, 15 bp, synthetic construct
  source 1..15: mol_type = other DNA
catagcgggccacct

SEQ ID NO: 3147 - DNA, 15 bp, synthetic construct
  source 1..15: mol_type = other DNA
atgggcatgttggct

SEQ ID NO: 3148 - DNA, 15 bp, synthetic construct
  source 1..15: mol_type = other DNA
gctccggaacaaaca

SEQ ID NO: 3149 - DNA, 15 bp, synthetic construct
  source 1..15: mol_type = other DNA
ggcaagtgctaccca

SEQ ID NO: 3150 - DNA, 15 bp, synthetic construct
  source 1..15: mol_type = other DNA
gttgaacagtacctg

SEQ ID NO: 3151 - DNA, 15 bp, synthetic construct
  source 1..15: mol_type = other DNA
ccagccatgcttggc

SEQ ID NO: 3152 - DNA, 15 bp, synthetic construct
  source 1..15: mol_type = other DNA
taatttcccttcctc

SEQ ID NO: 3153 - DNA, 15 bp, synthetic construct
  source 1..15: mol_type = other DNA
gccctggtgatagtc

SEQ ID NO: 3154 - DNA, 15 bp, synthetic construct
  source 1..15: mol_type = other DNA
tggaagatcatctcc

SEQ ID NO: 3155 - DNA, 15 bp, synthetic construct
  source 1..15: mol_type = other DNA
cactgggatgtgcca

SEQ ID NO: 3156 - DNA, 15 bp, synthetic construct
  source 1..15: mol_type = other DNA
ttaatctgcatctct

SEQ ID NO: 3157 - DNA, 15 bp, synthetic construct
  source 1..15: mol_type = other DNA
ggtctcagaacctca

SEQ ID NO: 3158 - DNA, 15 bp, synthetic construct
  source 1..15: mol_type = other DNA
tgtacagatcactgg

SEQ ID NO: 3159 - DNA, 15 bp, synthetic construct
  source 1..15: mol_type = other DNA
gctgccactccgact

SEQ ID NO: 3160 - DNA, 15 bp, synthetic construct
  source 1..15: mol_type = other DNA
tcactggctttggaa

SEQ ID NO: 3161 - DNA, 15 bp, synthetic construct
  source 1..15: mol_type = other DNA
ttccacgtcttggga

SEQ ID NO: 3162 - DNA, 15 bp, synthetic construct
  source 1..15: mol_type = other DNA
aactgtgtagctgct

SEQ ID NO: 3163 - DNA, 15 bp, synthetic construct
  source 1..15: mol_type = other DNA
tcacgattccctcca

SEQ ID NO: 3164 - DNA, 15 bp, synthetic construct
  source 1..15: mol_type = other DNA
tacactcagtgcgga

SEQ ID NO: 3165 - DNA, 15 bp, synthetic construct
  source 1..15: mol_type = other DNA
aggagtggcgagctc

SEQ ID NO: 3166 - DNA, 15 bp, synthetic construct
  source 1..15: mol_type = other DNA
ctacatcaaacgtga

SEQ ID NO: 3167 - DNA, 15 bp, synthetic construct
  source 1..15: mol_type = other DNA
gacagcatatttcac

SEQ ID NO: 3168 - DNA, 15 bp, synthetic construct
  source 1..15: mol_type = other DNA
cgtgaaacaggtaaa

SEQ ID NO: 3169 - DNA, 15 bp, synthetic construct
  source 1..15: mol_type = other DNA
gccgatgtgctgata

SEQ ID NO: 3170 - DNA, 15 bp, synthetic construct
  source 1..15: mol_type = other DNA
ccagagagaagttca

SEQ ID NO: 3171 - DNA, 15 bp, synthetic construct
  source 1..15: mol_type = other DNA
aggtggttatgcgag

SEQ ID NO: 3172 - DNA, 15 bp, synthetic construct
  source 1..15: mol_type = other DNA
atgtgggatgatgct

SEQ ID NO: 3173 - DNA, 15 bp, synthetic construct
  source 1..15: mol_type = other DNA
tggaactctttgaag

SEQ ID NO: 3174 - DNA, 15 bp, synthetic construct
  source 1..15: mol_type = other DNA
tgctgtagtcgcact

SEQ ID NO: 3175 - DNA, 15 bp, synthetic construct
  source 1..15: mol_type = other DNA
ggacaggtcaagcgg

SEQ ID NO: 3176 - DNA, 15 bp, synthetic construct
  source 1..15: mol_type = other DNA
caaagttattcacct

SEQ ID NO: 3177 - DNA, 15 bp, synthetic construct
  source 1..15: mol_type = other DNA
actctcagtactggc

SEQ ID NO: 3178 - DNA, 15 bp, synthetic construct
  source 1..15: mol_type = other DNA
ggccgtgaagttgag

SEQ ID NO: 3179 - DNA, 15 bp, synthetic construct
  source 1..15: mol_type = other DNA
gtccaagttgaaccc

SEQ ID NO: 3180 - DNA, 15 bp, synthetic construct
  source 1..15: mol_type = other DNA
gtgatgctgaggtca

SEQ ID NO: 3181 - DNA, 15 bp, synthetic construct
  source 1..15: mol_type = other DNA
cctcttgaggacacc

SEQ ID NO: 3182 - DNA, 15 bp, synthetic construct
  source 1..15: mol_type = other DNA
gctcaaaggagctgc

SEQ ID NO: 3183 - DNA, 15 bp, synthetic construct
  source 1..15: mol_type = other DNA
cgatggtattaagct

SEQ ID NO: 3184 - DNA, 15 bp, synthetic construct
  source 1..15: mol_type = other DNA
gggtggtttatgctg

SEQ ID NO: 3185 - DNA, 15 bp, synthetic construct
  source 1..15: mol_type = other DNA
gcaagtctggtgcac

SEQ ID NO: 3186 - DNA, 15 bp, synthetic construct
  source 1..15: mol_type = other DNA
ctcacaagtctgggt

SEQ ID NO: 3187 - DNA, 15 bp, synthetic construct
  source 1..15: mol_type = other DNA
tcatgttgatgaagg

SEQ ID NO: 3188 - DNA, 15 bp, synthetic construct
  source 1..15: mol_type = other DNA
gggatcgccaaactt

SEQ ID NO: 3189 - DNA, 15 bp, synthetic construct
  source 1..15: mol_type = other DNA
ccaaaatactggagc

SEQ ID NO: 3190 - DNA, 15 bp, synthetic construct
  source 1..15: mol_type = other DNA
tagacagcatacttc

SEQ ID NO: 3191 - DNA, 15 bp, synthetic construct
  source 1..15: mol_type = other DNA
gagcaccgaagggat

SEQ ID NO: 3192 - DNA, 15 bp, synthetic construct
  source 1..15: mol_type = other DNA
ccacatggctttcct

SEQ ID NO: 3193 - DNA, 15 bp, synthetic construct
  source 1..15: mol_type = other DNA
caaacgcagacctgg

SEQ ID NO: 3194 - DNA, 15 bp, synthetic construct
  source 1..15: mol_type = other DNA
aaggcagatgttgga

SEQ ID NO: 3195 - DNA, 15 bp, synthetic construct
  source 1..15: mol_type = other DNA
aactgcatgctcacc

SEQ ID NO: 3196 - DNA, 15 bp, synthetic construct
  source 1..15: mol_type = other DNA
acactcacgaccgac

SEQ ID NO: 3197 - DNA, 15 bp, synthetic construct
  source 1..15: mol_type = other DNA
gcagctgttatcttt

SEQ ID NO: 3198 - DNA, 15 bp, synthetic construct
  source 1..15: mol_type = other DNA
caggaagtcagatgc

SEQ ID NO: 3199 - DNA, 15 bp, synthetic construct
  source 1..15: mol_type = other DNA
gtgcactcctgagag

SEQ ID NO: 3200 - DNA, 15 bp, synthetic construct
  source 1..15: mol_type = other DNA
tgaggtagcggtcca

SEQ ID NO: 3201 - DNA, 15 bp, synthetic construct
  source 1..15: mol_type = other DNA
agccgtcatcagtgg

SEQ ID NO: 3202 - DNA, 15 bp, synthetic construct
  source 1..15: mol_type = other DNA
cagcttgtgcgccag

SEQ ID NO: 3203 - DNA, 15 bp, synthetic construct
  source 1..15: mol_type = other DNA
gacattcctgaggtc

SEQ ID NO: 3204 - DNA, 15 bp, synthetic construct
  source 1..15: mol_type = other DNA
ccgcgaagatgggct

SEQ ID NO: 3205 - DNA, 15 bp, synthetic construct
  source 1..15: mol_type = other DNA
agcgcctgtactccc

SEQ ID NO: 3206 - DNA, 15 bp, synthetic construct
  source 1..15: mol_type = other DNA
gtcactttttgtggg

SEQ ID NO: 3207 - DNA, 15 bp, synthetic construct
  source 1..15: mol_type = other DNA
gaacggcagcacggt

SEQ ID NO: 3208 - DNA, 15 bp, synthetic construct
  source 1..15: mol_type = other DNA
gaacgctgctgcctg

SEQ ID NO: 3209 - DNA, 15 bp, synthetic construct
  source 1..15: mol_type = other DNA
tgtacaagttgtcct

SEQ ID NO: 3210 - DNA, 15 bp, synthetic construct
  source 1..15: mol_type = other DNA
gagaggtccatcaga

SEQ ID NO: 3211 - DNA, 15 bp, synthetic construct
  source 1..15: mol_type = other DNA
ggcccttttcgaact

SEQ ID NO: 3212 - DNA, 15 bp, synthetic construct
  source 1..15: mol_type = other DNA
gcactcgcatacgtt

SEQ ID NO: 3213 - DNA, 15 bp, synthetic construct
  source 1..15: mol_type = other DNA
ttgttggtcagcttc

SEQ ID NO: 3214 - DNA, 15 bp, synthetic construct
  source 1..15: mol_type = other DNA
ggcatgggtttcgca

SEQ ID NO: 3215 - DNA, 15 bp, synthetic construct
  source 1..15: mol_type = other DNA
tggagtcaggatccc

SEQ ID NO: 3216 - DNA, 15 bp, synthetic construct
  source 1..15: mol_type = other DNA
actcaacacgccgcg

SEQ ID NO: 3217 - DNA, 15 bp, synthetic construct
  source 1..15: mol_type = other DNA
gcacgatgcctgcca

SEQ ID NO: 3218 - DNA, 15 bp, synthetic construct
  source 1..15: mol_type = other DNA
tccctgttgttcaga

SEQ ID NO: 3219 - DNA, 15 bp, synthetic construct
  source 1..15: mol_type = other DNA
tgatcctggaagtaa

SEQ ID NO: 3220 - DNA, 15 bp, synthetic construct
  source 1..15: mol_type = other DNA
cttgtcatgcctaga

SEQ ID NO: 3221 - DNA, 15 bp, synthetic construct
  source 1..15: mol_type = other DNA
agagatgaaggaagg

SEQ ID NO: 3222 - DNA, 15 bp, synthetic construct
  source 1..15: mol_type = other DNA
aaaccgccaggactc

SEQ ID NO: 3223 - DNA, 15 bp, synthetic construct
  source 1..15: mol_type = other DNA
ttgttgtcaacaaga

SEQ ID NO: 3224 - DNA, 15 bp, synthetic construct
  source 1..15: mol_type = other DNA
tcgcagggattctga

SEQ ID NO: 3225 - DNA, 15 bp, synthetic construct
  source 1..15: mol_type = other DNA
ctggtaggaatccac

SEQ ID NO: 3226 - DNA, 15 bp, synthetic construct
  source 1..15: mol_type = other DNA
tcatgtagctgggaa

SEQ ID NO: 3227 - DNA, 15 bp, synthetic construct
  source 1..15: mol_type = other DNA
tctccgataagagga

SEQ ID NO: 3228 - DNA, 15 bp, synthetic construct
  source 1..15: mol_type = other DNA
gcgccgtttcagatc

SEQ ID NO: 3229 - DNA, 15 bp, synthetic construct
  source 1..15: mol_type = other DNA
tggacaagtagcctg

SEQ ID NO: 3230 - DNA, 15 bp, synthetic construct
  source 1..15: mol_type = other DNA
cgcgcaagtgatgcc

SEQ ID NO: 3231 - DNA, 15 bp, synthetic construct
  source 1..15: mol_type = other DNA
tgctgttcttcttgg

SEQ ID NO: 3232 - DNA, 15 bp, synthetic construct
  source 1..15: mol_type = other DNA
tcaccacagttttgt

SEQ ID NO: 3233 - DNA, 15 bp, synthetic construct
  source 1..15: mol_type = other DNA
gggtttgtcactgag

SEQ ID NO: 3234 - DNA, 15 bp, synthetic construct
  source 1..15: mol_type = other DNA
cccagaactcgggag

SEQ ID NO: 3235 - DNA, 15 bp, synthetic construct
  source 1..15: mol_type = other DNA
accgccgtgcctact

SEQ ID NO: 3236 - DNA, 15 bp, synthetic construct
  source 1..15: mol_type = other DNA
tgtcttgtcaattcc

SEQ ID NO: 3237 - DNA, 15 bp, synthetic construct
  source 1..15: mol_type = other DNA
gaaacactaggcaaa

SEQ ID NO: 3238 - DNA, 15 bp, synthetic construct
  source 1..15: mol_type = other DNA
cgtcagtacatgccc

SEQ ID NO: 3239 - DNA, 15 bp, synthetic construct
  source 1..15: mol_type = other DNA
tatgaatgaggatct

SEQ ID NO: 3240 - DNA, 15 bp, synthetic construct
  source 1..15: mol_type = other DNA
ccatccttcaataca

SEQ ID NO: 3241 - DNA, 15 bp, synthetic construct
  source 1..15: mol_type = other DNA
tgtcttttcttggtc

SEQ ID NO: 3242 - DNA, 15 bp, synthetic construct
  source 1..15: mol_type = other DNA
acggactcagaacca

SEQ ID NO: 3243 - DNA, 15 bp, synthetic construct
  source 1..15: mol_type = other DNA
agacttcgatgcttt

SEQ ID NO: 3244 - DNA, 15 bp, synthetic construct
  source 1..15: mol_type = other DNA
acatttgccgcttgg

SEQ ID NO: 3245 - DNA, 15 bp, synthetic construct
  source 1..15: mol_type = other DNA
tccaaatttgcagaa

SEQ ID NO: 3246 - DNA, 15 bp, synthetic construct
  source 1..15: mol_type = other DNA
gatgctccaaggtca

SEQ ID NO: 3247 - DNA, 15 bp, synthetic construct
  source 1..15: mol_type = other DNA
cacttgtaggctcca

SEQ ID NO: 3248 - DNA, 15 bp, synthetic construct
  source 1..15: mol_type = other DNA
taatgaccagggtgg

SEQ ID NO: 3249 - DNA, 15 bp, synthetic construct
  source 1..15: mol_type = other DNA
cctcaacaaccttcc

SEQ ID NO: 3250 - DNA, 15 bp, synthetic construct
  source 1..15: mol_type = other DNA
accttccactgtact

SEQ ID NO: 3251 - DNA, 15 bp, synthetic construct
  source 1..15: mol_type = other DNA
cagaactagacacat

SEQ ID NO: 3252 - DNA, 15 bp, synthetic construct
  source 1..15: mol_type = other DNA
atctattgtgggctc

SEQ ID NO: 3253 - DNA, 15 bp, synthetic construct
  source 1..15: mol_type = other DNA
agcttgctttggaca

SEQ ID NO: 3254 - DNA, 15 bp, synthetic construct
  source 1..15: mol_type = other DNA
cggtgccttttaatc

SEQ ID NO: 3255 - DNA, 15 bp, synthetic construct
  source 1..15: mol_type = other DNA
gggatctgcatccca

SEQ ID NO: 3256 - DNA, 15 bp, synthetic construct
  source 1..15: mol_type = other DNA
attggacactaggaa

SEQ ID NO: 3257 - DNA, 15 bp, synthetic construct
  source 1..15: mol_type = other DNA
tagatccactgctgg

SEQ ID NO: 3258 - DNA, 15 bp, synthetic construct
  source 1..15: mol_type = other DNA
cagcgacagtcatgg

SEQ ID NO: 3259 - DNA, 15 bp, synthetic construct
  source 1..15: mol_type = other DNA
gaaaccaatcagcaa

SEQ ID NO: 3260 - DNA, 15 bp, synthetic construct
  source 1..15: mol_type = other DNA
actcccatttgtgat

SEQ ID NO: 3261 - DNA, 15 bp, synthetic construct
  source 1..15: mol_type = other DNA
caggatttctggttt

SEQ ID NO: 3262 - DNA, 15 bp, synthetic construct
  source 1..15: mol_type = other DNA
ggccaactcgtcatc

SEQ ID NO: 3263 - DNA, 15 bp, synthetic construct
  source 1..15: mol_type = other DNA
ccatggcagacagag

SEQ ID NO: 3264 - DNA, 15 bp, synthetic construct
  source 1..15: mol_type = other DNA
attttcttgcccttg

SEQ ID NO: 3265 - DNA, 15 bp, synthetic construct
  source 1..15: mol_type = other DNA
cttccagttcttttc

SEQ ID NO: 3266 - DNA, 15 bp, synthetic construct
  source 1..15: mol_type = other DNA
atacagctgttttct

SEQ ID NO: 3267 - DNA, 15 bp, synthetic construct
  source 1..15: mol_type = other DNA
ttcagggcaaattga

SEQ ID NO: 3268 - DNA, 15 bp, synthetic construct
  source 1..15: mol_type = other DNA
gggacatccttcact

SEQ ID NO: 3269 - DNA, 15 bp, synthetic construct
  source 1..15: mol_type = other DNA
ttgacagtgtgagaa

SEQ ID NO: 3270 - DNA, 15 bp, synthetic construct
  source 1..15: mol_type = other DNA
aatccatagaagtgg

SEQ ID NO: 3271 - DNA, 15 bp, synthetic construct
  source 1..15: mol_type = other DNA
gtcaagagtcaggat

SEQ ID NO: 3272 - DNA, 15 bp, synthetic construct
  source 1..15: mol_type = other DNA
gacaaggagaataat

SEQ ID NO: 3273 - DNA, 15 bp, synthetic construct
  source 1..15: mol_type = other DNA
acagagatcagtaat

SEQ ID NO: 3274 - DNA, 15 bp, synthetic construct
  source 1..15: mol_type = other DNA
aggttctgtgtgtgt

SEQ ID NO: 3275 - DNA, 15 bp, synthetic construct
  source 1..15: mol_type = other DNA
ggctggattctttgg

SEQ ID NO: 3276 - DNA, 15 bp, synthetic construct
  source 1..15: mol_type = other DNA
cctcccagaggaatc

SEQ ID NO: 3277 - DNA, 15 bp, synthetic construct
  source 1..15: mol_type = other DNA
caatatattgggcag

SEQ ID NO: 3278 - DNA, 15 bp, synthetic construct
  source 1..15: mol_type = other DNA
gatatattggttgcg

SEQ ID NO: 3279 - DNA, 15 bp, synthetic construct
  source 1..15: mol_type = other DNA
tcaacgaaaggcata

SEQ ID NO: 3280 - DNA, 15 bp, synthetic construct
  source 1..15: mol_type = other DNA
ttccaagagcgaagt

SEQ ID NO: 3281 - DNA, 15 bp, synthetic construct
  source 1..15: mol_type = other DNA
ggagattaaagaatc

SEQ ID NO: 3282 - DNA, 15 bp, synthetic construct
  source 1..15: mol_type = other DNA
aagaataaagcagag

SEQ ID NO: 3283 - DNA, 15 bp, synthetic construct
  source 1..15: mol_type = other DNA
aaattgttgactgga

SEQ ID NO: 3284 - DNA, 15 bp, synthetic construct
  source 1..15: mol_type = other DNA
cttggcaagaacagc

SEQ ID NO: 3285 - DNA, 15 bp, synthetic construct
  source 1..15: mol_type = other DNA
tagttctgtcctttg

SEQ ID NO: 3286 - DNA, 15 bp, synthetic construct
  source 1..15: mol_type = other DNA
acaccaactgccaaa

SEQ ID NO: 3287 - DNA, 15 bp, synthetic construct
  source 1..15: mol_type = other DNA
ctggctcaatactca

SEQ ID NO: 3288 - DNA, 15 bp, synthetic construct
  source 1..15: mol_type = other DNA
atgccgactttcgtt

SEQ ID NO: 3289 - DNA, 15 bp, synthetic construct
  source 1..15: mol_type = other DNA
ctaggtggttctagc

SEQ ID NO: 3290 - DNA, 15 bp, synthetic construct
  source 1..15: mol_type = other DNA
ggcatttatccctgg

SEQ ID NO: 3291 - DNA, 15 bp, synthetic construct
  source 1..15: mol_type = other DNA
atgaagtaacagttg

SEQ ID NO: 3292 - DNA, 15 bp, synthetic construct
  source 1..15: mol_type = other DNA
gaagctgaagcaggc

SEQ ID NO: 3293 - DNA, 15 bp, synthetic construct
  source 1..15: mol_type = other DNA
tgataatgccaaggt

SEQ ID NO: 3294 - DNA, 15 bp, synthetic construct
  source 1..15: mol_type = other DNA
atgtgagggaactgg

SEQ ID NO: 3295 - DNA, 15 bp, synthetic construct
  source 1..15: mol_type = other DNA
tgctgagaagtgaca

SEQ ID NO: 3296 - DNA, 15 bp, synthetic construct
  source 1..15: mol_type = other DNA
caaccaggcggtgtg

SEQ ID NO: 3297 - DNA, 15 bp, synthetic construct
  source 1..15: mol_type = other DNA
gggattttgaacttt

SEQ ID NO: 3298 - DNA, 15 bp, synthetic construct
  source 1..15: mol_type = other DNA
ggaatcctcgaacag

SEQ ID NO: 3299 - DNA, 15 bp, synthetic construct
  source 1..15: mol_type = other DNA
ctccacagagtggtc

SEQ ID NO: 3300 - DNA, 15 bp, synthetic construct
  source 1..15: mol_type = other DNA
atcacaagcctctga

SEQ ID NO: 3301 - DNA, 15 bp, synthetic construct
  source 1..15: mol_type = other DNA
acccttatacaatgt

SEQ ID NO: 3302 - DNA, 15 bp, synthetic construct
  source 1..15: mol_type = other DNA
gtttagcacatggcc

SEQ ID NO: 3303 - DNA, 15 bp, synthetic construct
  source 1..15: mol_type = other DNA
ctccttttctttgac

SEQ ID NO: 3304 - DNA, 15 bp, synthetic construct
  source 1..15: mol_type = other DNA
taccagtgcaacgtc

SEQ ID NO: 3305 - DNA, 15 bp, synthetic construct
  source 1..15: mol_type = other DNA
ctggtccctttatga

SEQ ID NO: 3306 - DNA, 15 bp, synthetic construct
  source 1..15: mol_type = other DNA
cacaaaggtccttat

SEQ ID NO: 3307 - DNA, 15 bp, synthetic construct
  source 1..15: mol_type = other DNA
attcacggttccaga

SEQ ID NO: 3308 - DNA, 15 bp, synthetic construct
  source 1..15: mol_type = other DNA
ggttactctgaggct

SEQ ID NO: 3309 - DNA, 15 bp, synthetic construct
  source 1..15: mol_type = other DNA
cccaagtccatgtca

SEQ ID NO: 3310 - DNA, 15 bp, synthetic construct
  source 1..15: mol_type = other DNA
agcaatactccctga

SEQ ID NO: 3311 - DNA, 15 bp, synthetic construct
  source 1..15: mol_type = other DNA
aagcccaatccatac

SEQ ID NO: 3312 - DNA, 15 bp, synthetic construct
  source 1..15: mol_type = other DNA
tggcatttgaacaac

SEQ ID NO: 3313 - DNA, 15 bp, synthetic construct
  source 1..15: mol_type = other DNA
aactgtcactccagc

SEQ ID NO: 3314 - DNA, 15 bp, synthetic construct
  source 1..15: mol_type = other DNA
gctgcaggtttcaga

SEQ ID NO: 3315 - DNA, 15 bp, synthetic construct
  source 1..15: mol_type = other DNA
aacacttcccttggt

SEQ ID NO: 3316 - DNA, 15 bp, synthetic construct
  source 1..15: mol_type = other DNA
gagtagcaaaagcct

SEQ ID NO: 3317 - DNA, 15 bp, synthetic construct
  source 1..15: mol_type = other DNA
catggctacagcgat

SEQ ID NO: 3318 - DNA, 15 bp, synthetic construct
  source 1..15: mol_type = other DNA
agagaggaatctaaa

SEQ ID NO: 3319 - DNA, 15 bp, synthetic construct
  source 1..15: mol_type = other DNA
tccgaccacgaatcc

SEQ ID NO: 3320 - DNA, 15 bp, synthetic construct
  source 1..15: mol_type = other DNA
tactagtcccatcca

SEQ ID NO: 3321 - DNA, 15 bp, synthetic construct
  source 1..15: mol_type = other DNA
aatctgacagtcttt

SEQ ID NO: 3322 - DNA, 15 bp, synthetic construct
  source 1..15: mol_type = other DNA
ttgattcttgtggat

SEQ ID NO: 3323 - DNA, 15 bp, synthetic construct
  source 1..15: mol_type = other DNA
ctttgcttttgccat

SEQ ID NO: 3324 - DNA, 15 bp, synthetic construct
  source 1..15: mol_type = other DNA
catgggactcaagca

SEQ ID NO: 3325 - DNA, 15 bp, synthetic construct
  source 1..15: mol_type = other DNA
gtggcagcatgaccc

SEQ ID NO: 3326 - DNA, 15 bp, synthetic construct
  source 1..15: mol_type = other DNA
ggctctcataccagt

SEQ ID NO: 3327 - DNA, 15 bp, synthetic construct
  source 1..15: mol_type = other DNA
cttctgcatttcaat

SEQ ID NO: 3328 - DNA, 15 bp, synthetic construct
  source 1..15: mol_type = other DNA
tacttaaggctggag

SEQ ID NO: 3329 - DNA, 15 bp, synthetic construct
  source 1..15: mol_type = other DNA
aggctggcattttga

SEQ ID NO: 3330 - DNA, 15 bp, synthetic construct
  source 1..15: mol_type = other DNA
tgttaccgctggtgt

SEQ ID NO: 3331 - DNA, 15 bp, synthetic construct
  source 1..15: mol_type = other DNA
gggccacagtaactt

SEQ ID NO: 3332 - DNA, 15 bp, synthetic construct
  source 1..15: mol_type = other DNA
atgtacgtatttgga

SEQ ID NO: 3333 - DNA, 15 bp, synthetic construct
  source 1..15: mol_type = other DNA
gtatcgtcaaggcac

SEQ ID NO: 3334 - DNA, 15 bp, synthetic construct
  source 1..15: mol_type = other DNA
tgaaactctctatga

SEQ ID NO: 3335 - DNA, 15 bp, synthetic construct
  source 1..15: mol_type = other DNA
gagacatattccatg

SEQ ID NO: 3336 - DNA, 15 bp, synthetic construct
  source 1..15: mol_type = other DNA
gaagaatcatcatca

SEQ ID NO: 3337 - DNA, 15 bp, synthetic construct
  source 1..15: mol_type = other DNA
gctgtgtcgagaata

SEQ ID NO: 3338 - DNA, 15 bp, synthetic construct
  source 1..15: mol_type = other DNA
cctcaccatgccatc

SEQ ID NO: 3339 - DNA, 15 bp, synthetic construct
  source 1..15: mol_type = other DNA
ctatccaaactgccc

SEQ ID NO: 3340 - DNA, 15 bp, synthetic construct
  source 1..15: mol_type = other DNA
tccgtgttggtaggg

SEQ ID NO: 3341 - DNA, 15 bp, synthetic construct
  source 1..15: mol_type = other DNA
caacactggatgacc

SEQ ID NO: 3342 - DNA, 15 bp, synthetic construct
  source 1..15: mol_type = other DNA
tcctactgtcgctaa

SEQ ID NO: 3343 - DNA, 15 bp, synthetic construct
  source 1..15: mol_type = other DNA
gatgtagggcatttc

SEQ ID NO: 3344 - DNA, 15 bp, synthetic construct
  source 1..15: mol_type = other DNA
cacagcagcaagtga

SEQ ID NO: 3345 - DNA, 15 bp, synthetic construct
  source 1..15: mol_type = other DNA
actggatagggttct

SEQ ID NO: 3346 - DNA, 15 bp, synthetic construct
  source 1..15: mol_type = other DNA
aagatattacagacc

SEQ ID NO: 3347 - DNA, 15 bp, synthetic construct
  source 1..15: mol_type = other DNA
tttatgaggccaagg

SEQ ID NO: 3348 - DNA, 15 bp, synthetic construct
  source 1..15: mol_type = other DNA
ctacctaacagtctt

SEQ ID NO: 3349 - DNA, 15 bp, synthetic construct
  source 1..15: mol_type = other DNA
gcatgtggaaggtag

SEQ ID NO: 3350 - DNA, 15 bp, synthetic construct
  source 1..15: mol_type = other DNA
ctgccttaacaggaa

SEQ ID NO: 3351 - DNA, 15 bp, synthetic construct
  source 1..15: mol_type = other DNA
aaaacgagaatggat

SEQ ID NO: 3352 - DNA, 15 bp, synthetic construct
  source 1..15: mol_type = other DNA
gaccgggattatgtc

SEQ ID NO: 3353 - DNA, 15 bp, synthetic construct
  source 1..15: mol_type = other DNA
taccaggagtagtcc

SEQ ID NO: 3354 - DNA, 15 bp, synthetic construct
  source 1..15: mol_type = other DNA
ccaccacctgaaaat

SEQ ID NO: 3355 - DNA, 15 bp, synthetic construct
  source 1..15: mol_type = other DNA
ttatatgccagatac

SEQ ID NO: 3356 - DNA, 15 bp, synthetic construct
  source 1..15: mol_type = other DNA
tttgcccatgtggaa

SEQ ID NO: 3357 - DNA, 15 bp, synthetic construct
  source 1..15: mol_type = other DNA
gtgcggatttggcgg

SEQ ID NO: 3358 - DNA, 15 bp, synthetic construct
  source 1..15: mol_type = other DNA
attgattgccaggag

SEQ ID NO: 3359 - DNA, 15 bp, synthetic construct
  source 1..15: mol_type = other DNA
aaaggttaggaatga

SEQ ID NO: 3360 - DNA, 15 bp, synthetic construct
  source 1..15: mol_type = other DNA
cacattgacattgaa

SEQ ID NO: 3361 - DNA, 15 bp, synthetic construct
  source 1..15: mol_type = other DNA
cctttgctgtgggag

SEQ ID NO: 3362 - DNA, 15 bp, synthetic construct
  source 1..15: mol_type = other DNA
acacctcaaaaccaa

SEQ ID NO: 3363 - DNA, 15 bp, synthetic construct
  source 1..15: mol_type = other DNA
tccaagtctcgatgc

SEQ ID NO: 3364 - DNA, 15 bp, synthetic construct
  source 1..15: mol_type = other DNA
tcttaccatccacta

SEQ ID NO: 3365 - DNA, 15 bp, synthetic construct
  source 1..15: mol_type = other DNA
ctcactcactggtgt

SEQ ID NO: 3366 - DNA, 15 bp, synthetic construct
  source 1..15: mol_type = other DNA
tgatgcctttgtggc

SEQ ID NO: 3367 - DNA, 15 bp, synthetic construct
  source 1..15: mol_type = other DNA
gatctcttgcatgtc

SEQ ID NO: 3368 - DNA, 15 bp, synthetic construct
  source 1..15: mol_type = other DNA
gggtctcggataaca

SEQ ID NO: 3369 - DNA, 15 bp, synthetic construct
  source 1..15: mol_type = other DNA
agtctggtgagactg

SEQ ID NO: 3370 - DNA, 15 bp, synthetic construct
  source 1..15: mol_type = other DNA
ctcattccttccacc

SEQ ID NO: 3371 - DNA, 15 bp, synthetic construct
  source 1..15: mol_type = other DNA
ccttgatctttggag

SEQ ID NO: 3372 - DNA, 15 bp, synthetic construct
  source 1..15: mol_type = other DNA
gtctcatgcgtgctt

SEQ ID NO: 3373 - DNA, 15 bp, synthetic construct
  source 1..15: mol_type = other DNA
ccagcagcacttggt

SEQ ID NO: 3374 - DNA, 15 bp, synthetic construct
  source 1..15: mol_type = other DNA
caggtatctttctaa

SEQ ID NO: 3375 - DNA, 15 bp, synthetic construct
  source 1..15: mol_type = other DNA
ttagagccacatcaa

SEQ ID NO: 3376 - DNA, 15 bp, synthetic construct
  source 1..15: mol_type = other DNA
caggaaacctgccat

SEQ ID NO: 3377 - DNA, 15 bp, synthetic construct
  source 1..15: mol_type = other DNA
gccttcccatttccg

SEQ ID NO: 3378 - DNA, 15 bp, synthetic construct
  source 1..15: mol_type = other DNA
gtctaaggtccttcg

SEQ ID NO: 3379 - DNA, 15 bp, synthetic construct
  source 1..15: mol_type = other DNA
gttcgtggatgtcac

SEQ ID NO: 3380 - DNA, 15 bp, synthetic construct
  source 1..15: mol_type = other DNA
aggaccttaatcaga

SEQ ID NO: 3381 - DNA, 15 bp, synthetic construct
  source 1..15: mol_type = other DNA
aatctttcttactgc

SEQ ID NO: 3382 - DNA, 15 bp, synthetic construct
  source 1..15: mol_type = other DNA
ccatctgtgtttggg

SEQ ID NO: 3383 - DNA, 15 bp, synthetic construct
  source 1..15: mol_type = other DNA
gcgttctgcagattg

SEQ ID NO: 3384 - DNA, 15 bp, synthetic construct
  source 1..15: mol_type = other DNA
ttaccctttaagaga

SEQ ID NO: 3385 - DNA, 15 bp, synthetic construct
  source 1..15: mol_type = other DNA
aaacactgcttgtga

SEQ ID NO: 3386 - DNA, 15 bp, synthetic construct
  source 1..15: mol_type = other DNA
attctgagttggcac

SEQ ID NO: 3387 - DNA, 15 bp, synthetic construct
  source 1..15: mol_type = other DNA
gatttcatcctcata

SEQ ID NO: 3388 - DNA, 15 bp, synthetic construct
  source 1..15: mol_type = other DNA
ctacctccggcaaga

SEQ ID NO: 3389 - DNA, 15 bp, synthetic construct
  source 1..15: mol_type = other DNA
tggtctagactactc

SEQ ID NO: 3390 - DNA, 15 bp, synthetic construct
  source 1..15: mol_type = other DNA
gtgaatgattaagtg

SEQ ID NO: 3391 - DNA, 15 bp, synthetic construct
  source 1..15: mol_type = other DNA
actagtgggttggga

SEQ ID NO: 3392 - DNA, 15 bp, synthetic construct
  source 1..15: mol_type = other DNA
aggcaatctccatgg

SEQ ID NO: 3393 - DNA, 15 bp, synthetic construct
  source 1..15: mol_type = other DNA
agttagaaccaaaac

SEQ ID NO: 3394 - DNA, 15 bp, synthetic construct
  source 1..15: mol_type = other DNA
tatagaactgcggca

SEQ ID NO: 3395 - DNA, 15 bp, synthetic construct
  source 1..15: mol_type = other DNA
gtgcatcaaccttgg

SEQ ID NO: 3396 - DNA, 15 bp, synthetic construct
  source 1..15: mol_type = other DNA
accacctccaaagcc

SEQ ID NO: 3397 - DNA, 15 bp, synthetic construct
  source 1..15: mol_type = other DNA
gcaggttcttagctc

SEQ ID NO: 3398 - DNA, 15 bp, synthetic construct
  source 1..15: mol_type = other DNA
ccctttttatccctt

SEQ ID NO: 3399 - DNA, 15 bp, synthetic construct
  source 1..15: mol_type = other DNA
tgttgcggaggtcat

SEQ ID NO: 3400 - DNA, 15 bp, synthetic construct
  source 1..15: mol_type = other DNA
atggatatcctcttg

SEQ ID NO: 3401 - DNA, 15 bp, synthetic construct
  source 1..15: mol_type = other DNA
tgactggcgagacat

SEQ ID NO: 3402 - DNA, 15 bp, synthetic construct
  source 1..15: mol_type = other DNA
cccaatctgtccttc

SEQ ID NO: 3403 - DNA, 15 bp, synthetic construct
  source 1..15: mol_type = other DNA
actcggcttctgtcc

SEQ ID NO: 3404 - DNA, 15 bp, synthetic construct
  source 1..15: mol_type = other DNA
ggttctcgtgtcagc

SEQ ID NO: 3405 - DNA, 15 bp, synthetic construct
  source 1..15: mol_type = other DNA
agggagctaggtact

SEQ ID NO: 3406 - DNA, 15 bp, synthetic construct
  source 1..15: mol_type = other DNA
gctataatgggcagg

SEQ ID NO: 3407 - DNA, 15 bp, synthetic construct
  source 1..15: mol_type = other DNA
gtttcagttcttatg

SEQ ID NO: 3408 - DNA, 15 bp, synthetic construct
  source 1..15: mol_type = other DNA
ggtattgatgagaag

SEQ ID NO: 3409 - DNA, 15 bp, synthetic construct
  source 1..15: mol_type = other DNA
gaatgcagactgcat

SEQ ID NO: 3410 - DNA, 15 bp, synthetic construct
  source 1..15: mol_type = other DNA
ataactgttgacttg

SEQ ID NO: 3411 - DNA, 15 bp, synthetic construct
  source 1..15: mol_type = other DNA
tcaggacaactgact

SEQ ID NO: 3412 - DNA, 15 bp, synthetic construct
  source 1..15: mol_type = other DNA
ctgtaataatacggg

SEQ ID NO: 3413 - DNA, 15 bp, synthetic construct
  source 1..15: mol_type = other DNA
ttccgggtattccgg

SEQ ID NO: 3414 - DNA, 15 bp, synthetic construct
  source 1..15: mol_type = other DNA
gctgctttattggaa

SEQ ID NO: 3415 - DNA, 15 bp, synthetic construct
  source 1..15: mol_type = other DNA
atttcatcttcgtac

SEQ ID NO: 3416 - DNA, 15 bp, synthetic construct
  source 1..15: mol_type = other DNA
gggagctgaagtgga

SEQ ID NO: 3417 - DNA, 15 bp, synthetic construct
  source 1..15: mol_type = other DNA
tgattgtgggtggtg

SEQ ID NO: 3418 - DNA, 15 bp, synthetic construct
  source 1..15: mol_type = other DNA
tgatctcatcattca

SEQ ID NO: 3419 - DNA, 15 bp, synthetic construct
  source 1..15: mol_type = other DNA
cagactgtctcactg

SEQ ID NO: 3420 - DNA, 15 bp, synthetic construct
  source 1..15: mol_type = other DNA
ccgttcccacaatgc

SEQ ID NO: 3421 - DNA, 15 bp, synthetic construct
  source 1..15: mol_type = other DNA
ccaattatacactcc

SEQ ID NO: 3422 - DNA, 15 bp, synthetic construct
  source 1..15: mol_type = other DNA
acagttctggaatcc

SEQ ID NO: 3423 - DNA, 15 bp, synthetic construct
  source 1..15: mol_type = other DNA
atagatcccaagagc

SEQ ID NO: 3424 - DNA, 15 bp, synthetic construct
  source 1..15: mol_type = other DNA
gtgaggagagctctc

SEQ ID NO: 3425 - DNA, 15 bp, synthetic construct
  source 1..15: mol_type = other DNA
tctcttcacaatgca

SEQ ID NO: 3426 - DNA, 15 bp, synthetic construct
  source 1..15: mol_type = other DNA
cttttgtcaccgccc

SEQ ID NO: 3427 - DNA, 15 bp, synthetic construct
  source 1..15: mol_type = other DNA
gggatggtcattcag

SEQ ID NO: 3428 - DNA, 15 bp, synthetic construct
  source 1..15: mol_type = other DNA
gtacgcttattgatc

SEQ ID NO: 3429 - DNA, 15 bp, synthetic construct
  source 1..15: mol_type = other DNA
agaggaccaacagat

SEQ ID NO: 3430 - DNA, 15 bp, synthetic construct
  source 1..15: mol_type = other DNA
aggaacaatccaggc

SEQ ID NO: 3431 - DNA, 15 bp, synthetic construct
  source 1..15: mol_type = other DNA
agaatcaataggtcc

SEQ ID NO: 3432 - DNA, 15 bp, synthetic construct
  source 1..15: mol_type = other DNA
catccgcgcacctag

SEQ ID NO: 3433 - DNA, 15 bp, synthetic construct
  source 1..15: mol_type = other DNA
ccatccttctctagg

SEQ ID NO: 3434 - DNA, 15 bp, synthetic construct
  source 1..15: mol_type = other DNA
cataaccacccaacc

SEQ ID NO: 3435 - DNA, 15 bp, synthetic construct
  source 1..15: mol_type = other DNA
cctgccagaaaaacg

SEQ ID NO: 3436 - DNA, 15 bp, synthetic construct
  source 1..15: mol_type = other DNA
tgtaaagaggaggag

SEQ ID NO: 3437 - DNA, 15 bp, synthetic construct
  source 1..15: mol_type = other DNA
gcagaagtcaggatg

SEQ ID NO: 3438 - DNA, 15 bp, synthetic construct
  source 1..15: mol_type = other DNA
gtgttccactgaggc

SEQ ID NO: 3439 - DNA, 15 bp, synthetic construct
  source 1..15: mol_type = other DNA
ttgctgagtgaatgt

SEQ ID NO: 3440 - DNA, 15 bp, synthetic construct
  source 1..15: mol_type = other DNA
atttcaaactcgcca

SEQ ID NO: 3441 - DNA, 15 bp, synthetic construct
  source 1..15: mol_type = other DNA
tgattcgggtgtgag

SEQ ID NO: 3442 - DNA, 15 bp, synthetic construct
  source 1..15: mol_type = other DNA
taccctgcatagcgg

SEQ ID NO: 3443 - DNA, 15 bp, synthetic construct
  source 1..15: mol_type = other DNA
ccaaacacctaaggg

SEQ ID NO: 3444 - DNA, 15 bp, synthetic construct
  source 1..15: mol_type = other DNA
ccgctaagtggtgat

SEQ ID NO: 3445 - DNA, 15 bp, synthetic construct
  source 1..15: mol_type = other DNA
cccttgctctaaggc

SEQ ID NO: 3446 - DNA, 15 bp, synthetic construct
  source 1..15: mol_type = other DNA
aagtggccgtcgtgg

SEQ ID NO: 3447 - DNA, 15 bp, synthetic construct
  source 1..15: mol_type = other DNA
caatgtgacagtggc

SEQ ID NO: 3448 - DNA, 15 bp, synthetic construct
  source 1..15: mol_type = other DNA
gagacgttgaagcca

SEQ ID NO: 3449 - DNA, 15 bp, synthetic construct
  source 1..15: mol_type = other DNA
ttatttggactgggc

SEQ ID NO: 3450 - DNA, 15 bp, synthetic construct
  source 1..15: mol_type = other DNA
gagaaaggacaccaa

SEQ ID NO: 3451 - DNA, 15 bp, synthetic construct
  source 1..15: mol_type = other DNA
taaagtcgccattgt

SEQ ID NO: 3452 - DNA, 15 bp, synthetic construct
  source 1..15: mol_type = other DNA
ccagatactggagtc

SEQ ID NO: 3453 - DNA, 15 bp, synthetic construct
  source 1..15: mol_type = other DNA
gaagtacactgctgc

SEQ ID NO: 3454 - DNA, 15 bp, synthetic construct
  source 1..15: mol_type = other DNA
acccagtcggaggct

SEQ ID NO: 3455 - DNA, 15 bp, synthetic construct
  source 1..15: mol_type = other DNA
tgtcaagggagttgg

SEQ ID NO: 3456 - DNA, 15 bp, synthetic construct
  source 1..15: mol_type = other DNA
tctgcaaggagtctg

SEQ ID NO: 3457 - DNA, 15 bp, synthetic construct
  source 1..15: mol_type = other DNA
ttctcctgacagcgc

SEQ ID NO: 3458 - DNA, 15 bp, synthetic construct
  source 1..15: mol_type = other DNA
gtggaccgtaagctg

SEQ ID NO: 3459 - DNA, 15 bp, synthetic construct
  source 1..15: mol_type = other DNA
ggctgcccatagctg

SEQ ID NO: 3460 - DNA, 15 bp, synthetic construct
  source 1..15: mol_type = other DNA
gtgtggaacttcagc

SEQ ID NO: 3461 - DNA, 15 bp, synthetic construct
  source 1..15: mol_type = other DNA
ccgtgtagccagtgg

SEQ ID NO: 3462 - DNA, 15 bp, synthetic construct
  source 1..15: mol_type = other DNA
tgccgttctcgtggc

SEQ ID NO: 3463 - DNA, 15 bp, synthetic construct
  source 1..15: mol_type = other DNA
ccagagatcctcatt

SEQ ID NO: 3464 - DNA, 15 bp, synthetic construct
  source 1..15: mol_type = other DNA
attcccggatctgct

SEQ ID NO: 3465 - DNA, 15 bp, synthetic construct
  source 1..15: mol_type = other DNA
tgaggatgtgatgca

SEQ ID NO: 3466 - DNA, 15 bp, synthetic construct
  source 1..15: mol_type = other DNA
ggcatctgctcactg

SEQ ID NO: 3467 - DNA, 15 bp, synthetic construct
  source 1..15: mol_type = other DNA
cataatagtaggact

SEQ ID NO: 3468 - DNA, 15 bp, synthetic construct
  source 1..15: mol_type = other DNA
tcgaacaccggcagg

SEQ ID NO: 3469 - DNA, 15 bp, synthetic construct
  source 1..15: mol_type = other DNA
gcgtagctggtgttg

SEQ ID NO: 3470 - DNA, 15 bp, synthetic construct
  source 1..15: mol_type = other DNA
gcagcaacacaggtc

SEQ ID NO: 3471 - DNA, 15 bp, synthetic construct
  source 1..15: mol_type = other DNA
gagatgaggagttcg

SEQ ID NO: 3472 - DNA, 15 bp, synthetic construct
  source 1..15: mol_type = other DNA
caaacgtgcattcct

SEQ ID NO: 3473 - DNA, 15 bp, synthetic construct
  source 1..15: mol_type = other DNA
cttcctgacagtgct

SEQ ID NO: 3474 - DNA, 15 bp, synthetic construct
  source 1..15: mol_type = other DNA
agcgttcacaggatg

SEQ ID NO: 3475 - DNA, 15 bp, synthetic construct
  source 1..15: mol_type = other DNA
aacttgctgcacggt

SEQ ID NO: 3476 - DNA, 15 bp, synthetic construct
  source 1..15: mol_type = other DNA
aagcagatacaggag

SEQ ID NO: 3477 - DNA, 15 bp, synthetic construct
  source 1..15: mol_type = other DNA
aactgtcttctccag

SEQ ID NO: 3478 - DNA, 15 bp, synthetic construct
  source 1..15: mol_type = other DNA
ccgtttttactccag

SEQ ID NO: 3479 - DNA, 15 bp, synthetic construct
  source 1..15: mol_type = other DNA
catacacacagacat

SEQ ID NO: 3480 - DNA, 15 bp, synthetic construct
  source 1..15: mol_type = other DNA
agtggcgggaaataa

SEQ ID NO: 3481 - DNA, 15 bp, synthetic construct
  source 1..15: mol_type = other DNA
tttaaatccatccac

SEQ ID NO: 3482 - DNA, 15 bp, synthetic construct
  source 1..15: mol_type = other DNA
ctcacacaaatgtgg

SEQ ID NO: 3483 - DNA, 15 bp, synthetic construct
  source 1..15: mol_type = other DNA
ggcaaccatttcttt

SEQ ID NO: 3484 - DNA, 15 bp, synthetic construct
  source 1..15: mol_type = other DNA
aatcgctggtaccct

SEQ ID NO: 3485 - DNA, 15 bp, synthetic construct
  source 1..15: mol_type = other DNA
tatggctcaagcacc

SEQ ID NO: 3486 - DNA, 15 bp, synthetic construct
  source 1..15: mol_type = other DNA
ggtcaaagtgaggaa

SEQ ID NO: 3487 - DNA, 15 bp, synthetic construct
  source 1..15: mol_type = other DNA
aactgtgtaaaatgc

SEQ ID NO: 3488 - DNA, 15 bp, synthetic construct
  source 1..15: mol_type = other DNA
tccattcatatatgg

SEQ ID NO: 3489 - DNA, 15 bp, synthetic construct
  source 1..15: mol_type = other DNA
ccttcaggacagcac

SEQ ID NO: 3490 - DNA, 15 bp, synthetic construct
  source 1..15: mol_type = other DNA
ccaacctaaggtggc

SEQ ID NO: 3491 - DNA, 15 bp, synthetic construct
  source 1..15: mol_type = other DNA
cacttgtaaccacac

SEQ ID NO: 3492 - DNA, 15 bp, synthetic construct
  source 1..15: mol_type = other DNA
acgacgccagtctac

SEQ ID NO: 3493 - DNA, 15 bp, synthetic construct
  source 1..15: mol_type = other DNA
atcaacaggatacca

SEQ ID NO: 3494 - DNA, 15 bp, synthetic construct
  source 1..15: mol_type = other DNA
gcactgagatgtctg

SEQ ID NO: 3495 - DNA, 15 bp, synthetic construct
  source 1..15: mol_type = other DNA
gtccatctttcggag

SEQ ID NO: 3496 - DNA, 15 bp, synthetic construct
  source 1..15: mol_type = other DNA
acgccattgtctttg

SEQ ID NO: 3497 - DNA, 15 bp, synthetic construct
  source 1..15: mol_type = other DNA
ttagcattgggagaa

SEQ ID NO: 3498 - DNA, 15 bp, synthetic construct
  source 1..15: mol_type = other DNA
gatttcataatgccc

SEQ ID NO: 3499 - DNA, 15 bp, synthetic construct
  source 1..15: mol_type = other DNA
ttgccacatagatgg

SEQ ID NO: 3500 - DNA, 15 bp, synthetic construct
  source 1..15: mol_type = other DNA
gtcattctggctctg

SEQ ID NO: 3501 - DNA, 15 bp, synthetic construct
  source 1..15: mol_type = other DNA
atactgtgaggagtg

SEQ ID NO: 3502 - DNA, 15 bp, synthetic construct
  source 1..15: mol_type = other DNA
ctgacgacctggaca

SEQ ID NO: 3503 - DNA, 15 bp, synthetic construct
  source 1..15: mol_type = other DNA
ttttccgttattggc

SEQ ID NO: 3504 - DNA, 15 bp, synthetic construct
  source 1..15: mol_type = other DNA
cctaattgcagtggg

SEQ ID NO: 3505 - DNA, 15 bp, synthetic construct
  source 1..15: mol_type = other DNA
aaagcagatctccca

SEQ ID NO: 3506 - DNA, 15 bp, synthetic construct
  source 1..15: mol_type = other DNA
aatgccgataaactt

SEQ ID NO: 3507 - DNA, 15 bp, synthetic construct
  source 1..15: mol_type = other DNA
tcaggtatcgacctg

SEQ ID NO: 3508 - DNA, 15 bp, synthetic construct
  source 1..15: mol_type = other DNA
gaagggctttcaggt

SEQ ID NO: 3509 - DNA, 15 bp, synthetic construct
  source 1..15: mol_type = other DNA
agggagtggattcta

SEQ ID NO: 3510 - DNA, 15 bp, synthetic construct
  source 1..15: mol_type = other DNA
aagtggaaaatgcat

SEQ ID NO: 3511 - DNA, 15 bp, synthetic construct
  source 1..15: mol_type = other DNA
agaggtttccaaagg

SEQ ID NO: 3512 - DNA, 15 bp, synthetic construct
  source 1..15: mol_type = other DNA
cttgggaatgtatgt

SEQ ID NO: 3513 - DNA, 15 bp, synthetic construct
  source 1..15: mol_type = other DNA
gaaaaactgggtaaa

SEQ ID NO: 3514 - DNA, 15 bp, synthetic construct
  source 1..15: mol_type = other DNA
cattgtcatccagcc

SEQ ID NO: 3515 - DNA, 15 bp, synthetic construct
  source 1..15: mol_type = other DNA
tcaaggtcacgttca

SEQ ID NO: 3516 - DNA, 15 bp, synthetic construct
  source 1..15: mol_type = other DNA
ggtacgtgtcttagc

SEQ ID NO: 3517 - DNA, 15 bp, synthetic construct
  source 1..15: mol_type = other DNA
ctgttgtcaccttta

SEQ ID NO: 3518 - DNA, 15 bp, synthetic construct
  source 1..15: mol_type = other DNA
ttctcacacactcca

SEQ ID NO: 3519 - DNA, 15 bp, synthetic construct
  source 1..15: mol_type = other DNA
atcccttagctgaac

SEQ ID NO: 3520 - DNA, 15 bp, synthetic construct
  source 1..15: mol_type = other DNA
tgattgcagacggtt

SEQ ID NO: 3521 - DNA, 15 bp, synthetic construct
  source 1..15: mol_type = other DNA
tttgtgaggcaccat

SEQ ID NO: 3522 - DNA, 15 bp, synthetic construct
  source 1..15: mol_type = other DNA
aggttggacgatagg

SEQ ID NO: 3523 - DNA, 15 bp, synthetic construct
  source 1..15: mol_type = other DNA
atcttgtccagacgt

SEQ ID NO: 3524 - DNA, 15 bp, synthetic construct
  source 1..15: mol_type = other DNA
ggaaagtgtcaactt

SEQ ID NO: 3525 - DNA, 15 bp, synthetic construct
  source 1..15: mol_type = other DNA
tgtattttgttcagg

SEQ ID NO: 3526 - DNA, 15 bp, synthetic construct
  source 1..15: mol_type = other DNA
ttagcatccagacgc

SEQ ID NO: 3527 - DNA, 15 bp, synthetic construct
  source 1..15: mol_type = other DNA
gatattgggtttgcc

SEQ ID NO: 3528 - DNA, 15 bp, synthetic construct
  source 1..15: mol_type = other DNA
gttttcacgccaagg

SEQ ID NO: 3529 - DNA, 15 bp, synthetic construct
  source 1..15: mol_type = other DNA
gcaagtgtcctcagc

SEQ ID NO: 3530 - DNA, 15 bp, synthetic construct
  source 1..15: mol_type = other DNA
tctttctacaactca

SEQ ID NO: 3531 - DNA, 15 bp, synthetic construct
  source 1..15: mol_type = other DNA
gcgctgagcaagtcg

SEQ ID NO: 3532 - DNA, 15 bp, synthetic construct
  source 1..15: mol_type = other DNA
ctccaatgttacatc

SEQ ID NO: 3533 - DNA, 15 bp, synthetic construct
  source 1..15: mol_type = other DNA
ccctcagagatcttt

SEQ ID NO: 3534 - DNA, 15 bp, synthetic construct
  source 1..15: mol_type = other DNA
cacattccaatagca

SEQ ID NO: 3535 - DNA, 15 bp, synthetic construct
  source 1..15: mol_type = other DNA
atttctactccgaca

SEQ ID NO: 3536 - DNA, 15 bp, synthetic construct
  source 1..15: mol_type = other DNA
tttactttcgatgtc

SEQ ID NO: 3537 - DNA, 15 bp, synthetic construct
  source 1..15: mol_type = other DNA
tgtagcccgcggaca

SEQ ID NO: 3538 - DNA, 15 bp, synthetic construct
  source 1..15: mol_type = other DNA
aagcactgcttagga

SEQ ID NO: 3539 - DNA, 15 bp, synthetic construct
  source 1..15: mol_type = other DNA
ctccctagaacagaa

SEQ ID NO: 3540 - DNA, 15 bp, synthetic construct
  source 1..15: mol_type = other DNA
tggcacccaactctc

SEQ ID NO: 3541 - DNA, 15 bp, synthetic construct
  source 1..15: mol_type = other DNA
caagagatggacatt

SEQ ID NO: 3542 - DNA, 15 bp, synthetic construct
  source 1..15: mol_type = other DNA
gttttcccttccgaa

SEQ ID NO: 3543 - DNA, 15 bp, synthetic construct
  source 1..15: mol_type = other DNA
acatgaaggagcctt

SEQ ID NO: 3544 - DNA, 15 bp, synthetic construct
  source 1..15: mol_type = other DNA
tgtaagacgtctaca

SEQ ID NO: 3545 - DNA, 15 bp, synthetic construct
  source 1..15: mol_type = other DNA
aaaccgggccacatc

SEQ ID NO: 3546 - DNA, 15 bp, synthetic construct
  source 1..15: mol_type = other DNA
caactgaagcatgac

SEQ ID NO: 3547 - DNA, 15 bp, synthetic construct
  source 1..15: mol_type = other DNA
tgaatggagcgctcg

SEQ ID NO: 3548 - DNA, 15 bp, synthetic construct
  source 1..15: mol_type = other DNA
aggtagccacggact

SEQ ID NO: 3549 - DNA, 15 bp, synthetic construct
  source 1..15: mol_type = other DNA
tcagacttcctgcaa

SEQ ID NO: 3550 - DNA, 15 bp, synthetic construct
  source 1..15: mol_type = other DNA
aatgtcaacatgccc

SEQ ID NO: 3551 - DNA, 15 bp, synthetic construct
  source 1..15: mol_type = other DNA
ggattttcttcattc

SEQ ID NO: 3552 - DNA, 15 bp, synthetic construct
  source 1..15: mol_type = other DNA
caccgaccgtgggtt

SEQ ID NO: 3553 - DNA, 15 bp, synthetic construct
  source 1..15: mol_type = other DNA
accatcattatctgt

SEQ ID NO: 3554 - DNA, 15 bp, synthetic construct
  source 1..15: mol_type = other DNA
acgaatagcaacttg

SEQ ID NO: 3555 - DNA, 15 bp, synthetic construct
  source 1..15: mol_type = other DNA
acggatgtgtcatct

SEQ ID NO: 3556 - DNA, 15 bp, synthetic construct
  source 1..15: mol_type = other DNA
cgaacgctcctttag

SEQ ID NO: 3557 - DNA, 15 bp, synthetic construct
  source 1..15: mol_type = other DNA
accgcaggtcggata

SEQ ID NO: 3558 - DNA, 15 bp, synthetic construct
  source 1..15: mol_type = other DNA
tcctccatacggcgt

SEQ ID NO: 3559 - DNA, 15 bp, synthetic construct
  source 1..15: mol_type = other DNA
tgtggttgatgatat

SEQ ID NO: 3560 - DNA, 15 bp, synthetic construct
  source 1..15: mol_type = other DNA
cctttccagcttagg

SEQ ID NO: 3561 - DNA, 15 bp, synthetic construct
  source 1..15: mol_type = other DNA
aggatgcgtgggttg

SEQ ID NO: 3562 - DNA, 15 bp, synthetic construct
  source 1..15: mol_type = other DNA
catcacacctccagt

SEQ ID NO: 3563 - DNA, 15 bp, synthetic construct
  source 1..15: mol_type = other DNA
acttgtgggttggtc

SEQ ID NO: 3564 - DNA, 15 bp, synthetic construct
  source 1..15: mol_type = other DNA
gcatgtctctgtcga

SEQ ID NO: 3565 - DNA, 15 bp, synthetic construct
  source 1..15: mol_type = other DNA
aggtgagatccgtca

SEQ ID NO: 3566 - DNA, 15 bp, synthetic construct
  source 1..15: mol_type = other DNA
gtccctgcaatcaac

SEQ ID NO: 3567 - DNA, 15 bp, synthetic construct
  source 1..15: mol_type = other DNA
actctccattgccac

SEQ ID NO: 3568 - DNA, 15 bp, synthetic construct
  source 1..15: mol_type = other DNA
tatctgatgacttga

SEQ ID NO: 3569 - DNA, 15 bp, synthetic construct
  source 1..15: mol_type = other DNA
gtttgtcacagcgcc

SEQ ID NO: 3570 - DNA, 15 bp, synthetic construct
  source 1..15: mol_type = other DNA
gaagataatggaggc

SEQ ID NO: 3571 - DNA, 15 bp, synthetic construct
  source 1..15: mol_type = other DNA
tgagccatcatcaca

SEQ ID NO: 3572 - DNA, 15 bp, synthetic construct
  source 1..15: mol_type = other DNA
atagcttccatccaa

SEQ ID NO: 3573 - DNA, 15 bp, synthetic construct
  source 1..15: mol_type = other DNA
taatggcacccagtc

SEQ ID NO: 3574 - DNA, 15 bp, synthetic construct
  source 1..15: mol_type = other DNA
atactgtccacgctc

SEQ ID NO: 3575 - DNA, 15 bp, synthetic construct
  source 1..15: mol_type = other DNA
aaatcccatcacaaa

SEQ ID NO: 3576 - DNA, 15 bp, synthetic construct
  source 1..15: mol_type = other DNA
ggtgctgtttgctgt

SEQ ID NO: 3577 - DNA, 15 bp, synthetic construct
  source 1..15: mol_type = other DNA
ccactagggcagatc

SEQ ID NO: 3578 - DNA, 15 bp, synthetic construct
  source 1..15: mol_type = other DNA
gccattctcacaggc

SEQ ID NO: 3579 - DNA, 15 bp, synthetic construct
  source 1..15: mol_type = other DNA
gggccatgtggaagc

SEQ ID NO: 3580 - DNA, 15 bp, synthetic construct
  source 1..15: mol_type = other DNA
gaggttcacgcaggt

SEQ ID NO: 3581 - DNA, 15 bp, synthetic construct
  source 1..15: mol_type = other DNA
acccgttctcacagg

SEQ ID NO: 3582 - DNA, 15 bp, synthetic construct
  source 1..15: mol_type = other DNA
tgatcacactcgcag

SEQ ID NO: 3583 - DNA, 15 bp, synthetic construct
  source 1..15: mol_type = other DNA
cgcccttttcccttg

SEQ ID NO: 3584 - DNA, 15 bp, synthetic construct
  source 1..15: mol_type = other DNA
agtggactgcttcag

SEQ ID NO: 3585 - DNA, 15 bp, synthetic construct
  source 1..15: mol_type = other DNA
acccgtggctgttga

SEQ ID NO: 3586 - DNA, 15 bp, synthetic construct
  source 1..15: mol_type = other DNA
tacaccttggctgca

SEQ ID NO: 3587 - DNA, 15 bp, synthetic construct
  source 1..15: mol_type = other DNA
gcgtccttgcacagg

SEQ ID NO: 3588 - DNA, 15 bp, synthetic construct
  source 1..15: mol_type = other DNA
gctcacactcgttca

SEQ ID NO: 3589 - DNA, 15 bp, synthetic construct
  source 1..15: mol_type = other DNA
ctgaggacactccag

SEQ ID NO: 3590 - DNA, 15 bp, synthetic construct
  source 1..15: mol_type = other DNA
ggtaacaccggccca

SEQ ID NO: 3591 - DNA, 15 bp, synthetic construct
  source 1..15: mol_type = other DNA
cgttcaggatgccgc

SEQ ID NO: 3592 - DNA, 15 bp, synthetic construct
  source 1..15: mol_type = other DNA
aatgacctcctcgca

SEQ ID NO: 3593 - DNA, 15 bp, synthetic construct
  source 1..15: mol_type = other DNA
cctgttcaggcattg

SEQ ID NO: 3594 - DNA, 15 bp, synthetic construct
  source 1..15: mol_type = other DNA
cttgatcttcttgat

SEQ ID NO: 3595 - DNA, 15 bp, synthetic construct
  source 1..15: mol_type = other DNA
gacagttgaaggagc

SEQ ID NO: 3596 - DNA, 15 bp, synthetic construct
  source 1..15: mol_type = other DNA
ggtgcactttccatg

SEQ ID NO: 3597 - DNA, 15 bp, synthetic construct
  source 1..15: mol_type = other DNA
aagccgggattgcac

SEQ ID NO: 3598 - DNA, 15 bp, synthetic construct
  source 1..15: mol_type = other DNA
cgttggcgcactcgt

SEQ ID NO: 3599 - DNA, 15 bp, synthetic construct
  source 1..15: mol_type = other DNA
agctcgcgtaggtgt

SEQ ID NO: 3600 - DNA, 15 bp, synthetic construct
  source 1..15: mol_type = other DNA
atgagtaagctgcag

SEQ ID NO: 3601 - DNA, 15 bp, synthetic construct
  source 1..15: mol_type = other DNA
tgagataaacgcaga

SEQ ID NO: 3602 - DNA, 15 bp, synthetic construct
  source 1..15: mol_type = other DNA
agggatgacacattg

SEQ ID NO: 3603 - DNA, 15 bp, synthetic construct
  source 1..15: mol_type = other DNA
caaccaaggagtgag

SEQ ID NO: 3604 - DNA, 15 bp, synthetic construct
  source 1..15: mol_type = other DNA
tctgtcaggacggaa

SEQ ID NO: 3605 - DNA, 15 bp, synthetic construct
  source 1..15: mol_type = other DNA
ctccacacataggtt

SEQ ID NO: 3606 - DNA, 15 bp, synthetic construct
  source 1..15: mol_type = other DNA
gttgtggtttatatg

SEQ ID NO: 3607 - DNA, 15 bp, synthetic construct
  source 1..15: mol_type = other DNA
tagaagagagacagg

SEQ ID NO: 3608 - DNA, 15 bp, synthetic construct
  source 1..15: mol_type = other DNA
gcctgcctttcatct

SEQ ID NO: 3609 - DNA, 15 bp, synthetic construct
  source 1..15: mol_type = other DNA
acgcaaatgcttgat

SEQ ID NO: 3610 - DNA, 15 bp, synthetic construct
  source 1..15: mol_type = other DNA
gattgaagctcaagt

SEQ ID NO: 3611 - DNA, 15 bp, synthetic construct
  source 1..15: mol_type = other DNA
aatcaatgccaggaa

SEQ ID NO: 3612 - DNA, 15 bp, synthetic construct
  source 1..15: mol_type = other DNA
gatgagcagaccttt

SEQ ID NO: 3613 - DNA, 15 bp, synthetic construct
  source 1..15: mol_type = other DNA
gcacttgggtagctt

SEQ ID NO: 3614 - DNA, 15 bp, synthetic construct
  source 1..15: mol_type = other DNA
ttcatacatatccgg

SEQ ID NO: 3615 - DNA, 15 bp, synthetic construct
  source 1..15: mol_type = other DNA
gtcaactcagtctca

SEQ ID NO: 3616 - DNA, 15 bp, synthetic construct
  source 1..15: mol_type = other DNA
gatgattgcccataa

SEQ ID NO: 3617 - DNA, 15 bp, synthetic construct
  source 1..15: mol_type = other DNA
gctgatcttattgtt

SEQ ID NO: 3618 - DNA, 15 bp, synthetic construct
  source 1..15: mol_type = other DNA
gttttcaaggttttc

SEQ ID NO: 3619 - DNA, 15 bp, synthetic construct
  source 1..15: mol_type = other DNA
tgtaccataagatag

SEQ ID NO: 3620 - DNA, 15 bp, synthetic construct
  source 1..15: mol_type = other DNA
atggatgaaggtcag

SEQ ID NO: 3621 - DNA, 15 bp, synthetic construct
  source 1..15: mol_type = other DNA
gaggcaccattggta

SEQ ID NO: 3622 - DNA, 15 bp, synthetic construct
  source 1..15: mol_type = other DNA
aaaggttttgcacat

SEQ ID NO: 3623 - DNA, 15 bp, synthetic construct
  source 1..15: mol_type = other DNA
cccaggatcttgcag

SEQ ID NO: 3624 - DNA, 15 bp, synthetic construct
  source 1..15: mol_type = other DNA
ggatggagagttctg

SEQ ID NO: 3625 - DNA, 15 bp, synthetic construct
  source 1..15: mol_type = other DNA
ctggaatgcacgagt

SEQ ID NO: 3626 - DNA, 15 bp, synthetic construct
  source 1..15: mol_type = other DNA
aaccaagggtggact

SEQ ID NO: 3627 - DNA, 15 bp, synthetic construct
  source 1..15: mol_type = other DNA
tccaatggcagtcct

SEQ ID NO: 3628 - DNA, 15 bp, synthetic construct
  source 1..15: mol_type = other DNA
caagcactagcagag

SEQ ID NO: 3629 - DNA, 15 bp, synthetic construct
  source 1..15: mol_type = other DNA
ctgctggttcgcctt

SEQ ID NO: 3630 - DNA, 15 bp, synthetic construct
  source 1..15: mol_type = other DNA
acctggatggaaagc

SEQ ID NO: 3631 - DNA, 15 bp, synthetic construct
  source 1..15: mol_type = other DNA
aaatgtaaccatgtg

SEQ ID NO: 3632 - DNA, 15 bp, synthetic construct
  source 1..15: mol_type = other DNA
gtgatatgagaggca

SEQ ID NO: 3633 - DNA, 15 bp, synthetic construct
  source 1..15: mol_type = other DNA
caacttggtccttgc

SEQ ID NO: 3634 - DNA, 15 bp, synthetic construct
  source 1..15: mol_type = other DNA
agtctaagcgggagg

SEQ ID NO: 3635 - DNA, 15 bp, synthetic construct
  source 1..15: mol_type = other DNA
aaatcaggacaccca

SEQ ID NO: 3636 - DNA, 15 bp, synthetic construct
  source 1..15: mol_type = other DNA
gctgcaaactgtcgg

SEQ ID NO: 3637 - DNA, 15 bp, synthetic construct
  source 1..15: mol_type = other DNA
catctccaacccagc

SEQ ID NO: 3638 - DNA, 15 bp, synthetic construct
  source 1..15: mol_type = other DNA
tgagacgaatgagcc

SEQ ID NO: 3639 - DNA, 15 bp, synthetic construct
  source 1..15: mol_type = other DNA
tatgtacttggccaa

SEQ ID NO: 3640 - DNA, 15 bp, synthetic construct
  source 1..15: mol_type = other DNA
aatccaagaccagct

SEQ ID NO: 3641 - DNA, 15 bp, synthetic construct
  source 1..15: mol_type = other DNA
ctgtagacatggtgc

SEQ ID NO: 3642 - DNA, 15 bp, synthetic construct
  source 1..15: mol_type = other DNA
taaaagggaaggcct

SEQ ID NO: 3643 - DNA, 15 bp, synthetic construct
  source 1..15: mol_type = other DNA
ctacttaggcgcttt

SEQ ID NO: 3644 - DNA, 15 bp, synthetic construct
  source 1..15: mol_type = other DNA
gcaggtattgtagag

SEQ ID NO: 3645 - DNA, 15 bp, synthetic construct
  source 1..15: mol_type = other DNA
tgtcactgacaataa

SEQ ID NO: 3646 - DNA, 15 bp, synthetic construct
  source 1..15: mol_type = other DNA
gagtcatgaggactg

SEQ ID NO: 3647 - DNA, 15 bp, synthetic construct
  source 1..15: mol_type = other DNA
gggtttgggctaatc

SEQ ID NO: 3648 - DNA, 15 bp, synthetic construct
  source 1..15: mol_type = other DNA
acgggttgggagggt

SEQ ID NO: 3649 - DNA, 15 bp, synthetic construct
  source 1..15: mol_type = other DNA
cttcttttgagtttc

SEQ ID NO: 3650 - DNA, 15 bp, synthetic construct
  source 1..15: mol_type = other DNA
gtgataggtgggcaa

SEQ ID NO: 3651 - DNA, 15 bp, synthetic construct
  source 1..15: mol_type = other DNA
catccctgctgatga

SEQ ID NO: 3652 - DNA, 15 bp, synthetic construct
  source 1..15: mol_type = other DNA
atttttagggagacg

SEQ ID NO: 3653 - DNA, 15 bp, synthetic construct
  source 1..15: mol_type = other DNA
gggtccaagctattt

SEQ ID NO: 3654 - DNA, 15 bp, synthetic construct
  source 1..15: mol_type = other DNA
tgtgaacagagggat

SEQ ID NO: 3655 - DNA, 15 bp, synthetic construct
  source 1..15: mol_type = other DNA
tctgaagcgcagtaa

SEQ ID NO: 3656 - DNA, 15 bp, synthetic construct
  source 1..15: mol_type = other DNA
cgaataatgtcattg

SEQ ID NO: 3657 - DNA, 15 bp, synthetic construct
  source 1..15: mol_type = other DNA
atcatggtctggatc

SEQ ID NO: 3658 - DNA, 15 bp, synthetic construct
  source 1..15: mol_type = other DNA
cagggaatccaacct

SEQ ID NO: 3659 - DNA, 15 bp, synthetic construct
  source 1..15: mol_type = other DNA
cttccctggaaagat

SEQ ID NO: 3660 - DNA, 15 bp, synthetic construct
  source 1..15: mol_type = other DNA
agcaaatagttccta

SEQ ID NO: 3661 - DNA, 15 bp, synthetic construct
  source 1..15: mol_type = other DNA
agctgaatggatata

SEQ ID NO: 3662 - DNA, 15 bp, synthetic construct
  source 1..15: mol_type = other DNA
gaccattctctgccc

SEQ ID NO: 3663 - DNA, 15 bp, synthetic construct
  source 1..15: mol_type = other DNA
agaggttggtgtagc

SEQ ID NO: 3664 - DNA, 15 bp, synthetic construct
  source 1..15: mol_type = other DNA
agaatgcagcctaca

SEQ ID NO: 3665 - DNA, 15 bp, synthetic construct
  source 1..15: mol_type = other DNA
gtttccatgaggtcc

SEQ ID NO: 3666 - DNA, 15 bp, synthetic construct
  source 1..15: mol_type = other DNA
gttaccacatgcaga

SEQ ID NO: 3667 - DNA, 15 bp, synthetic construct
  source 1..15: mol_type = other DNA
ttgcctgcctgcctg

SEQ ID NO: 3668 - DNA, 15 bp, synthetic construct
  source 1..15: mol_type = other DNA
tccagatatgggtgg

SEQ ID NO: 3669 - DNA, 15 bp, synthetic construct
  source 1..15: mol_type = other DNA
aacagcctgttccat

SEQ ID NO: 3670 - DNA, 15 bp, synthetic construct
  source 1..15: mol_type = other DNA
agagatgtgggtctg

SEQ ID NO: 3671 - DNA, 15 bp, synthetic construct
  source 1..15: mol_type = other DNA
ctgaggtgttgtgtc

SEQ ID NO: 3672 - DNA, 15 bp, synthetic construct
  source 1..15: mol_type = other DNA
gggctgattttcttg

SEQ ID NO: 3673 - DNA, 15 bp, synthetic construct
  source 1..15: mol_type = other DNA
tggttacctctacac

SEQ ID NO: 3674 - DNA, 15 bp, synthetic construct
  source 1..15: mol_type = other DNA
tgagcacgtccagtc

SEQ ID NO: 3675 - DNA, 15 bp, synthetic construct
  source 1..15: mol_type = other DNA
ccctgtaccaacgtg

SEQ ID NO: 3676 - DNA, 15 bp, synthetic construct
  source 1..15: mol_type = other DNA
cttgtgtgggttgaa

SEQ ID NO: 3677 - DNA, 15 bp, synthetic construct
  source 1..15: mol_type = other DNA
ttttggtaatacagg

SEQ ID NO: 3678 - DNA, 15 bp, synthetic construct
  source 1..15: mol_type = other DNA
tgtagaaggaaaaag

SEQ ID NO: 3679 - DNA, 15 bp, synthetic construct
  source 1..15: mol_type = other DNA
caagaaacgcgtacg

SEQ ID NO: 3680 - DNA, 15 bp, synthetic construct
  source 1..15: mol_type = other DNA
ggcttttgcccagcc

SEQ ID NO: 3681 - DNA, 15 bp, synthetic construct
  source 1..15: mol_type = other DNA
cacttagttaagagg

SEQ ID NO: 3682 - DNA, 15 bp, synthetic construct
  source 1..15: mol_type = other DNA
tgccgtgtccaatac

SEQ ID NO: 3683 - DNA, 15 bp, synthetic construct
  source 1..15: mol_type = other DNA
tttccctgtagtctt

SEQ ID NO: 3684 - DNA, 15 bp, synthetic construct
  source 1..15: mol_type = other DNA
ttcaggcagtgtgtg

SEQ ID NO: 3685 - DNA, 15 bp, synthetic construct
  source 1..15: mol_type = other DNA
ataactcttcctcat

SEQ ID NO: 3686 - DNA, 15 bp, synthetic construct
  source 1..15: mol_type = other DNA
gcatgctaggtcaac

SEQ ID NO: 3687 - DNA, 15 bp, synthetic construct
  source 1..15: mol_type = other DNA
aactgctccttcgga

SEQ ID NO: 3688 - DNA, 15 bp, synthetic construct
  source 1..15: mol_type = other DNA
gcaggtggaagtatc

SEQ ID NO: 3689 - DNA, 15 bp, synthetic construct
  source 1..15: mol_type = other DNA
aatgttcagggtggc

SEQ ID NO: 3690 - DNA, 15 bp, synthetic construct
  source 1..15: mol_type = other DNA
accatatctcctggc

SEQ ID NO: 3691 - DNA, 15 bp, synthetic construct
  source 1..15: mol_type = other DNA
atgaccatgtccatc

SEQ ID NO: 3692 - DNA, 15 bp, synthetic construct
  source 1..15: mol_type = other DNA
tgtcagagatgatct

SEQ ID NO: 3693 - DNA, 15 bp, synthetic construct
  source 1..15: mol_type = other DNA
ctacaatgttcagtt

SEQ ID NO: 3694 - DNA, 15 bp, synthetic construct
  source 1..15: mol_type = other DNA
tgttcaaagtagaga

SEQ ID NO: 3695 - DNA, 15 bp, synthetic construct
  source 1..15: mol_type = other DNA
gtcatatggcaggat

SEQ ID NO: 3696 - DNA, 15 bp, synthetic construct
  source 1..15: mol_type = other DNA
cagaactcttaaccc

SEQ ID NO: 3697 - DNA, 15 bp, synthetic construct
  source 1..15: mol_type = other DNA
gttggatgctccaag

SEQ ID NO: 3698 - DNA, 15 bp, synthetic construct
  source 1..15: mol_type = other DNA
ctccatagaagccat

SEQ ID NO: 3699 - DNA, 15 bp, synthetic construct
  source 1..15: mol_type = other DNA
attactgagcccaaa

SEQ ID NO: 3700 - DNA, 15 bp, synthetic construct
  source 1..15: mol_type = other DNA
tggctactcctcact

SEQ ID NO: 3701 - DNA, 15 bp, synthetic construct
  source 1..15: mol_type = other DNA
cttcagattccagaa

SEQ ID NO: 3702 - DNA, 15 bp, synthetic construct
  source 1..15: mol_type = other DNA
tcggttggctaagtc

SEQ ID NO: 3703 - DNA, 15 bp, synthetic construct
  source 1..15: mol_type = other DNA
aaagtcaaggtgcag

SEQ ID NO: 3704 - DNA, 15 bp, synthetic construct
  source 1..15: mol_type = other DNA
aatcaatcctgtgaa

SEQ ID NO: 3705 - DNA, 15 bp, synthetic construct
  source 1..15: mol_type = other DNA
agatcatcactggct

SEQ ID NO: 3706 - DNA, 15 bp, synthetic construct
  source 1..15: mol_type = other DNA
tttcggcgaaatact

SEQ ID NO: 3707 - DNA, 15 bp, synthetic construct
  source 1..15: mol_type = other DNA
tgggcttacacttcg

SEQ ID NO: 3708 - DNA, 15 bp, synthetic construct
  source 1..15: mol_type = other DNA
tgatgggatgtttcc

SEQ ID NO: 3709 - DNA, 15 bp, synthetic construct
  source 1..15: mol_type = other DNA
ttaactgcttcaggg

SEQ ID NO: 3710 - DNA, 15 bp, synthetic construct
  source 1..15: mol_type = other DNA
caacgcgctgcaaag

SEQ ID NO: 3711 - DNA, 15 bp, synthetic construct
  source 1..15: mol_type = other DNA
gccatccacttcact

SEQ ID NO: 3712 - DNA, 15 bp, synthetic construct
  source 1..15: mol_type = other DNA
aggaccaactgtgca

SEQ ID NO: 3713 - DNA, 15 bp, synthetic construct
  source 1..15: mol_type = other DNA
ggcttgctttgtgcg

SEQ ID NO: 3714 - DNA, 15 bp, synthetic construct
  source 1..15: mol_type = other DNA
ccagaggcatttcca

SEQ ID NO: 3715 - DNA, 15 bp, synthetic construct
  source 1..15: mol_type = other DNA
gtatggtaggaccac

SEQ ID NO: 3716 - DNA, 15 bp, synthetic construct
  source 1..15: mol_type = other DNA
ttttccaaggacggt

SEQ ID NO: 3717 - DNA, 15 bp, synthetic construct
  source 1..15: mol_type = other DNA
ttcatcacggcgcgc

SEQ ID NO: 3718 - DNA, 15 bp, synthetic construct
  source 1..15: mol_type = other DNA
aaactttttgcttgc

SEQ ID NO: 3719 - DNA, 15 bp, synthetic construct
  source 1..15: mol_type = other DNA
tgtgtagccattttg

SEQ ID NO: 3720 - DNA, 15 bp, synthetic construct
  source 1..15: mol_type = other DNA
cacacatttgtcgtg

SEQ ID NO: 3721 - DNA, 15 bp, synthetic construct
  source 1..15: mol_type = other DNA
tgaaccgttctgaga

SEQ ID NO: 3722 - DNA, 15 bp, synthetic construct
  source 1..15: mol_type = other DNA
tgatatacacaacca

SEQ ID NO: 3723 - DNA, 15 bp, synthetic construct
  source 1..15: mol_type = other DNA
aggttctttccacca

SEQ ID NO: 3724 - DNA, 15 bp, synthetic construct
  source 1..15: mol_type = other DNA
acacatggcagatcg

SEQ ID NO: 3725 - DNA, 15 bp, synthetic construct
  source 1..15: mol_type = other DNA
tcccttgcaacaagt

SEQ ID NO: 3726 - DNA, 15 bp, synthetic construct
  source 1..15: mol_type = other DNA
ttccaatttccagag

SEQ ID NO: 3727 - DNA, 15 bp, synthetic construct
  source 1..15: mol_type = other DNA
tcgccataggtgaag

SEQ ID NO: 3728 - DNA, 15 bp, synthetic construct
  source 1..15: mol_type = other DNA
atttcttttgccctt

SEQ ID NO: 3729 - DNA, 15 bp, synthetic construct
  source 1..15: mol_type = other DNA
ttttccttccaagcc

SEQ ID NO: 3730 - DNA, 15 bp, synthetic construct
  source 1..15: mol_type = other DNA
agcgagcctcggtac

SEQ ID NO: 3731 - DNA, 15 bp, synthetic construct
  source 1..15: mol_type = other DNA
tatcagttcaggccc

SEQ ID NO: 3732 - DNA, 15 bp, synthetic construct
  source 1..15: mol_type = other DNA
ccgtcactgccactc

SEQ ID NO: 3733 - DNA, 15 bp, synthetic construct
  source 1..15: mol_type = other DNA
gcatttgggtcctct

SEQ ID NO: 3734 - DNA, 15 bp, synthetic construct
  source 1..15: mol_type = other DNA
gttggtttgatgggc

SEQ ID NO: 3735 - DNA, 15 bp, synthetic construct
  source 1..15: mol_type = other DNA
cactcgagggagaaa

SEQ ID NO: 3736 - DNA, 15 bp, synthetic construct
  source 1..15: mol_type = other DNA
tattcacaagcagct

SEQ ID NO: 3737 - DNA, 15 bp, synthetic construct
  source 1..15: mol_type = other DNA
tctcgttgaacaact

SEQ ID NO: 3738 - DNA, 15 bp, synthetic construct
  source 1..15: mol_type = other DNA
gaagatagggcacag

SEQ ID NO: 3739 - DNA, 15 bp, synthetic construct
  source 1..15: mol_type = other DNA
atgggcagtgtcgga

SEQ ID NO: 3740 - DNA, 15 bp, synthetic construct
  source 1..15: mol_type = other DNA
cttgcccttcaacgc

SEQ ID NO: 3741 - DNA, 15 bp, synthetic construct
  source 1..15: mol_type = other DNA
agtgagccgatcttc

SEQ ID NO: 3742 - DNA, 15 bp, synthetic construct
  source 1..15: mol_type = other DNA
cttgaagcgggcttt

SEQ ID NO: 3743 - DNA, 15 bp, synthetic construct
  source 1..15: mol_type = other DNA
gatttgtccctgttg

SEQ ID NO: 3744 - DNA, 15 bp, synthetic construct
  source 1..15: mol_type = other DNA
aaagatccagtttct

SEQ ID NO: 3745 - DNA, 15 bp, synthetic construct
  source 1..15: mol_type = other DNA
tcacacgcttttggg

SEQ ID NO: 3746 - DNA, 15 bp, synthetic construct
  source 1..15: mol_type = other DNA
gaagccaaaggagct

SEQ ID NO: 3747 - DNA, 15 bp, synthetic construct
  source 1..15: mol_type = other DNA
agctttctggagagt

SEQ ID NO: 3748 - DNA, 15 bp, synthetic construct
  source 1..15: mol_type = other DNA
gtggccagaaaacag

SEQ ID NO: 3749 - DNA, 15 bp, synthetic construct
  source 1..15: mol_type = other DNA
tcagggtttcagcat

SEQ ID NO: 3750 - DNA, 15 bp, synthetic construct
  source 1..15: mol_type = other DNA
tttctagagtcgctg

SEQ ID NO: 3751 - DNA, 15 bp, synthetic construct
  source 1..15: mol_type = other DNA
tgcaacacgatgtaa

SEQ ID NO: 3752 - DNA, 15 bp, synthetic construct
  source 1..15: mol_type = other DNA
ttttcaaccactggg

SEQ ID NO: 3753 - DNA, 15 bp, synthetic construct
  source 1..15: mol_type = other DNA
gagagttgtcccgat

SEQ ID NO: 3754 - DNA, 15 bp, synthetic construct
  source 1..15: mol_type = other DNA
tttcaacttgcctcc

SEQ ID NO: 3755 - DNA, 15 bp, synthetic construct
  source 1..15: mol_type = other DNA
ttcgtaagcagcttc

SEQ ID NO: 3756 - DNA, 15 bp, synthetic construct
  source 1..15: mol_type = other DNA
ttatcccttgcctat

SEQ ID NO: 3757 - DNA, 15 bp, synthetic construct
  source 1..15: mol_type = other DNA
aaagagcagcatcga

SEQ ID NO: 3758 - DNA, 15 bp, synthetic construct
  source 1..15: mol_type = other DNA
aatctggcgtgtaat

SEQ ID NO: 3759 - DNA, 15 bp, synthetic construct
  source 1..15: mol_type = other DNA
atgtgttttccattc

SEQ ID NO: 3760 - DNA, 15 bp, synthetic construct
  source 1..15: mol_type = other DNA
gctagggtacatcaa

SEQ ID NO: 3761 - DNA, 15 bp, synthetic construct
  source 1..15: mol_type = other DNA
ccagagttggaaggc

SEQ ID NO: 3762 - DNA, 15 bp, synthetic construct
  source 1..15: mol_type = other DNA
tcttctttctcagtg

SEQ ID NO: 3763 - DNA, 15 bp, synthetic construct
  source 1..15: mol_type = other DNA
ctccaatacctgggc

SEQ ID NO: 3764 - DNA, 15 bp, synthetic construct
  source 1..15: mol_type = other DNA
tcaactttgtggcca

SEQ ID NO: 3765 - DNA, 15 bp, synthetic construct
  source 1..15: mol_type = other DNA
catcctgagctagct

SEQ ID NO: 3766 - DNA, 15 bp, synthetic construct
  source 1..15: mol_type = other DNA
atttgtgcgcatgta

SEQ ID NO: 3767 - DNA, 15 bp, synthetic construct
  source 1..15: mol_type = other DNA
ggataacctggatcc

SEQ ID NO: 3768 - DNA, 15 bp, synthetic construct
  source 1..15: mol_type = other DNA
gagttgcatactctg

SEQ ID NO: 3769 - DNA, 15 bp, synthetic construct
  source 1..15: mol_type = other DNA
gtatgtacataagca

SEQ ID NO: 3770 - DNA, 15 bp, synthetic construct
  source 1..15: mol_type = other DNA
aaccaaatgctaaca

SEQ ID NO: 3771 - DNA, 15 bp, synthetic construct
  source 1..15: mol_type = other DNA
tgcagttgtcaccag

SEQ ID NO: 3772 - DNA, 15 bp, synthetic construct
  source 1..15: mol_type = other DNA
cagactaccaggcaa

SEQ ID NO: 3773 - DNA, 15 bp, synthetic construct
  source 1..15: mol_type = other DNA
atcaaactttgctgt

SEQ ID NO: 3774 - DNA, 15 bp, synthetic construct
  source 1..15: mol_type = other DNA
tgcctggtagttcac

SEQ ID NO: 3775 - DNA, 15 bp, synthetic construct
  source 1..15: mol_type = other DNA
aggcatcatcacgac

SEQ ID NO: 3776 - DNA, 15 bp, synthetic construct
  source 1..15: mol_type = other DNA
atctctctcatttgt

SEQ ID NO: 3777 - DNA, 15 bp, synthetic construct
  source 1..15: mol_type = other DNA
tggttgtccaatatc

SEQ ID NO: 3778 - DNA, 15 bp, synthetic construct
  source 1..15: mol_type = other DNA
taagtgttccttaca

SEQ ID NO: 3779 - DNA, 15 bp, synthetic construct
  source 1..15: mol_type = other DNA
tcttgcaaccgagtc

SEQ ID NO: 3780 - DNA, 15 bp, synthetic construct
  source 1..15: mol_type = other DNA
tgctaactgactcag

SEQ ID NO: 3781 - DNA, 15 bp, synthetic construct
  source 1..15: mol_type = other DNA
tgtgatctgtgacct

SEQ ID NO: 3782 - DNA, 15 bp, synthetic construct
  source 1..15: mol_type = other DNA
gaggtgacaatttta

SEQ ID NO: 3783 - DNA, 15 bp, synthetic construct
  source 1..15: mol_type = other DNA
tgtggtaagatttac

SEQ ID NO: 3784 - DNA, 15 bp, synthetic construct
  source 1..15: mol_type = other DNA
tcacttgggaagtgg

SEQ ID NO: 3785 - DNA, 15 bp, synthetic construct
  source 1..15: mol_type = other DNA
cctgctcaagcaagg

SEQ ID NO: 3786 - DNA, 15 bp, synthetic construct
  source 1..15: mol_type = other DNA
ctgcaagggtcttgg

SEQ ID NO: 3787 - DNA, 15 bp, synthetic construct
  source 1..15: mol_type = other DNA
ccgagtggttggcag

SEQ ID NO: 3788 - DNA, 15 bp, synthetic construct
  source 1..15: mol_type = other DNA
actacagcttgaata

SEQ ID NO: 3789 - DNA, 15 bp, synthetic construct
  source 1..15: mol_type = other DNA
cactgtatccaggac

SEQ ID NO: 3790 - DNA, 15 bp, synthetic construct
  source 1..15: mol_type = other DNA
ctcaggaagttcggt

SEQ ID NO: 3791 - DNA, 15 bp, synthetic construct
  source 1..15: mol_type = other DNA
tctgatagacttgat

SEQ ID NO: 3792 - DNA, 15 bp, synthetic construct
  source 1..15: mol_type = other DNA
ctgattctgctccag

SEQ ID NO: 3793 - DNA, 15 bp, synthetic construct
  source 1..15: mol_type = other DNA
gcttccatcactgca

SEQ ID NO: 3794 - DNA, 15 bp, synthetic construct
  source 1..15: mol_type = other DNA
acactggcttgtggg

SEQ ID NO: 3795 - DNA, 15 bp, synthetic construct
  source 1..15: mol_type = other DNA
tcaggatcacgcgca

SEQ ID NO: 3796 - DNA, 15 bp, synthetic construct
  source 1..15: mol_type = other DNA
aagatactggaggaa

SEQ ID NO: 3797 - DNA, 15 bp, synthetic construct
  source 1..15: mol_type = other DNA
cagaaactgctagtg

SEQ ID NO: 3798 - DNA, 15 bp, synthetic construct
  source 1..15: mol_type = other DNA
cattctggagatctc

SEQ ID NO: 3799 - DNA, 15 bp, synthetic construct
  source 1..15: mol_type = other DNA
gtccaccaaaggctc

SEQ ID NO: 3800 - DNA, 15 bp, synthetic construct
  source 1..15: mol_type = other DNA
aagtctcgtccgatt

SEQ ID NO: 3801 - DNA, 15 bp, synthetic construct
  source 1..15: mol_type = other DNA
gtactggaagcctgg

SEQ ID NO: 3802 - DNA, 15 bp, synthetic construct
  source 1..15: mol_type = other DNA
ggattatagggatta

SEQ ID NO: 3803 - DNA, 15 bp, synthetic construct
  source 1..15: mol_type = other DNA
tgtatgtggtgttga

SEQ ID NO: 3804 - DNA, 15 bp, synthetic construct
  source 1..15: mol_type = other DNA
ggcatcttcacaagg

SEQ ID NO: 3805 - DNA, 15 bp, synthetic construct
  source 1..15: mol_type = other DNA
aggatcatcttggtg

SEQ ID NO: 3806 - DNA, 15 bp, synthetic construct
  source 1..15: mol_type = other DNA
tggcaattgcagtcc

SEQ ID NO: 3807 - DNA, 15 bp, synthetic construct
  source 1..15: mol_type = other DNA
ggaagccacgtacac

SEQ ID NO: 3808 - DNA, 15 bp, synthetic construct
  source 1..15: mol_type = other DNA
tctgatcagattggg

SEQ ID NO: 3809 - DNA, 15 bp, synthetic construct
  source 1..15: mol_type = other DNA
gctagtaaggtgacc

SEQ ID NO: 3810 - DNA, 15 bp, synthetic construct
  source 1..15: mol_type = other DNA
gagctctgagatcga

SEQ ID NO: 3811 - DNA, 15 bp, synthetic construct
  source 1..15: mol_type = other DNA
ttgacgtcgttgctc

SEQ ID NO: 3812 - DNA, 15 bp, synthetic construct
  source 1..15: mol_type = other DNA
aggagaaaaagacat

SEQ ID NO: 3813 - DNA, 15 bp, synthetic construct
  source 1..15: mol_type = other DNA
ctcattgatcactgc

SEQ ID NO: 3814 - DNA, 15 bp, synthetic construct
  source 1..15: mol_type = other DNA
tttcttatggcctgg

SEQ ID NO: 3815 - DNA, 15 bp, synthetic construct
  source 1..15: mol_type = other DNA
attgccctctagtgc

SEQ ID NO: 3816 - DNA, 15 bp, synthetic construct
  source 1..15: mol_type = other DNA
tcatcatggagaaat

SEQ ID NO: 3817 - DNA, 15 bp, synthetic construct
  source 1..15: mol_type = other DNA
tcagtccaagtgtat

SEQ ID NO: 3818 - DNA, 15 bp, synthetic construct
  source 1..15: mol_type = other DNA
ttgtggtagcttcca

SEQ ID NO: 3819 - DNA, 15 bp, synthetic construct
  source 1..15: mol_type = other DNA
attcggacacccatc

SEQ ID NO: 3820 - DNA, 15 bp, synthetic construct
  source 1..15: mol_type = other DNA
ttggtaaacgttaca

SEQ ID NO: 3821 - DNA, 15 bp, synthetic construct
  source 1..15: mol_type = other DNA
gacgcaaaacaacga

SEQ ID NO: 3822 - DNA, 15 bp, synthetic construct
  source 1..15: mol_type = other DNA
tcgtttactgtcgca

SEQ ID NO: 3823 - DNA, 15 bp, synthetic construct
  source 1..15: mol_type = other DNA
atcggaaaggactgc

SEQ ID NO: 3824 - DNA, 15 bp, synthetic construct
  source 1..15: mol_type = other DNA
tgcaaaacgctcgcg

SEQ ID NO: 3825 - DNA, 15 bp, synthetic construct
  source 1..15: mol_type = other DNA
tgttatgtcgctggc

SEQ ID NO: 3826 - DNA, 15 bp, synthetic construct
  source 1..15: mol_type = other DNA
acaagcttttcgtgc

SEQ ID NO: 3827 - DNA, 15 bp, synthetic construct
  source 1..15: mol_type = other DNA
cagagctcgacaaaa

SEQ ID NO: 3828 - DNA, 15 bp, synthetic construct
  source 1..15: mol_type = other DNA
gtaatccactttgct

SEQ ID NO: 3829 - DNA, 15 bp, synthetic construct
  source 1..15: mol_type = other DNA
agtagcgtatacatg

SEQ ID NO: 3830 - DNA, 15 bp, synthetic construct
  source 1..15: mol_type = other DNA
tgttggcagcttttc

SEQ ID NO: 3831 - DNA, 15 bp, synthetic construct
  source 1..15: mol_type = other DNA
gggtcacctttcagc

SEQ ID NO: 3832 - DNA, 15 bp, synthetic construct
  source 1..15: mol_type = other DNA
gcggtttggacggca

SEQ ID NO: 3833 - DNA, 15 bp, synthetic construct
  source 1..15: mol_type = other DNA
ataagggaattgtga

SEQ ID NO: 3834 - DNA, 15 bp, synthetic construct
  source 1..15: mol_type = other DNA
aatgttgaaagcgta

SEQ ID NO: 3835 - DNA, 15 bp, synthetic construct
  source 1..15: mol_type = other DNA
aacgtgtgttctgaa

SEQ ID NO: 3836 - DNA, 15 bp, synthetic construct
  source 1..15: mol_type = other DNA
ttgggttcgggagtc

SEQ ID NO: 3837 - DNA, 15 bp, synthetic construct
  source 1..15: mol_type = other DNA
tcttcctcgatggtc

SEQ ID NO: 3838 - DNA, 15 bp, synthetic construct
  source 1..15: mol_type = other DNA
ggcatacggccacca

SEQ ID NO: 3839 - DNA, 15 bp, synthetic construct
  source 1..15: mol_type = other DNA
gatgtagccaagagg

SEQ ID NO: 3840 - DNA, 15 bp, synthetic construct
  source 1..15: mol_type = other DNA
ttccaggttcagctg

SEQ ID NO: 3841 - DNA, 15 bp, synthetic construct
  source 1..15: mol_type = other DNA
cccattcataatctg

SEQ ID NO: 3842 - DNA, 15 bp, synthetic construct
  source 1..15: mol_type = other DNA
cagcatcactgacaa

SEQ ID NO: 3843 - DNA, 15 bp, synthetic construct
  source 1..15: mol_type = other DNA
gctattacaagttcc

SEQ ID NO: 3844 - DNA, 15 bp, synthetic construct
  source 1..15: mol_type = other DNA
gctgctacaatggct

SEQ ID NO: 3845 - DNA, 15 bp, synthetic construct
  source 1..15: mol_type = other DNA
ccacagaatggaagt

SEQ ID NO: 3846 - DNA, 15 bp, synthetic construct
  source 1..15: mol_type = other DNA
tctgggtgttgtcat

SEQ ID NO: 3847 - DNA, 15 bp, synthetic construct
  source 1..15: mol_type = other DNA
cttttccttctctca

SEQ ID NO: 3848 - DNA, 15 bp, synthetic construct
  source 1..15: mol_type = other DNA
agcttccctcatggg

SEQ ID NO: 3849 - DNA, 15 bp, synthetic construct
  source 1..15: mol_type = other DNA
caagggctgatttgg

SEQ ID NO: 3850 - DNA, 15 bp, synthetic construct
  source 1..15: mol_type = other DNA
cacagttgtatatgt

SEQ ID NO: 3851 - DNA, 15 bp, synthetic construct
  source 1..15: mol_type = other DNA
gtaggtagacatgca

SEQ ID NO: 3852 - DNA, 15 bp, synthetic construct
  source 1..15: mol_type = other DNA
cgtagatgtggaata

SEQ ID NO: 3853 - DNA, 15 bp, synthetic construct
  source 1..15: mol_type = other DNA
ggtgcagtttgtttc

SEQ ID NO: 3854 - DNA, 15 bp, synthetic construct
  source 1..15: mol_type = other DNA
tcaacgatgccagct

SEQ ID NO: 3855 - DNA, 15 bp, synthetic construct
  source 1..15: mol_type = other DNA
atctgaggcaaggcc

SEQ ID NO: 3856 - DNA, 15 bp, synthetic construct
  source 1..15: mol_type = other DNA
tgtgtcatgcatctg

SEQ ID NO: 3857 - DNA, 15 bp, synthetic construct
  source 1..15: mol_type = other DNA
agcaaagaggctcaa

SEQ ID NO: 3858 - DNA, 15 bp, synthetic construct
  source 1..15: mol_type = other DNA
tttcagttagcccaa

SEQ ID NO: 3859 - DNA, 15 bp, synthetic construct
  source 1..15: mol_type = other DNA
ttgacttggctctca

SEQ ID NO: 3860 - DNA, 15 bp, synthetic construct
  source 1..15: mol_type = other DNA
gtgcgtatgtgcaga

SEQ ID NO: 3861 - DNA, 15 bp, synthetic construct
  source 1..15: mol_type = other DNA
ggatcatcagaagac

SEQ ID NO: 3862 - DNA, 15 bp, synthetic construct
  source 1..15: mol_type = other DNA
cctagatttgggttg

SEQ ID NO: 3863 - DNA, 15 bp, synthetic construct
  source 1..15: mol_type = other DNA
agcatgtctcttgga

SEQ ID NO: 3864 - DNA, 15 bp, synthetic construct
  source 1..15: mol_type = other DNA
agttaaggcagagac

SEQ ID NO: 3865 - DNA, 15 bp, synthetic construct
  source 1..15: mol_type = other DNA
atggccagcgcaacc

SEQ ID NO: 3866 - DNA, 15 bp, synthetic construct
  source 1..15: mol_type = other DNA
tggtggtgaaatggg

SEQ ID NO: 3867 - DNA, 15 bp, synthetic construct
  source 1..15: mol_type = other DNA
tgcccgtagttcttt

SEQ ID NO: 3868 - DNA, 15 bp, synthetic construct
  source 1..15: mol_type = other DNA
ctgttgcgggtttag

SEQ ID NO: 3869 - DNA, 15 bp, synthetic construct
  source 1..15: mol_type = other DNA
tagccgaagtctcct

SEQ ID NO: 3870 - DNA, 15 bp, synthetic construct
  source 1..15: mol_type = other DNA
atggtaggtatcccg

SEQ ID NO: 3871 - DNA, 15 bp, synthetic construct
  source 1..15: mol_type = other DNA
tatatcgagaggctg

SEQ ID NO: 3872 - DNA, 15 bp, synthetic construct
  source 1..15: mol_type = other DNA
tggacattgatggta

SEQ ID NO: 3873 - DNA, 15 bp, synthetic construct
  source 1..15: mol_type = other DNA
tgctgggatcttcca

SEQ ID NO: 3874 - DNA, 15 bp, synthetic construct
  source 1..15: mol_type = other DNA
caccacagatcctgg

SEQ ID NO: 3875 - DNA, 15 bp, synthetic construct
  source 1..15: mol_type = other DNA
ttccaggtgttggca

SEQ ID NO: 3876 - DNA, 15 bp, synthetic construct
  source 1..15: mol_type = other DNA
atggaacagatgttg

SEQ ID NO: 3877 - DNA, 15 bp, synthetic construct
  source 1..15: mol_type = other DNA
gaatgagcccagtga

SEQ ID NO: 3878 - DNA, 15 bp, synthetic construct
  source 1..15: mol_type = other DNA
gccactcccgtaaat

SEQ ID NO: 3879 - DNA, 15 bp, synthetic construct
  source 1..15: mol_type = other DNA
aggaagacgggcgga

SEQ ID NO: 3880 - DNA, 15 bp, synthetic construct
  source 1..15: mol_type = other DNA
cttgtaggagcctcg

SEQ ID NO: 3881 - DNA, 15 bp, synthetic construct
  source 1..15: mol_type = other DNA
gttgtagtagtcgca

SEQ ID NO: 3882 - DNA, 15 bp, synthetic construct
  source 1..15: mol_type = other DNA
cacctggtttgtgaa

SEQ ID NO: 3883 - DNA, 15 bp, synthetic construct
  source 1..15: mol_type = other DNA
gaacttagtgtccag

SEQ ID NO: 3884 - DNA, 15 bp, synthetic construct
  source 1..15: mol_type = other DNA
ggcatcgctcttctc

SEQ ID NO: 3885 - DNA, 15 bp, synthetic construct
  source 1..15: mol_type = other DNA
gcagttgacgaaata

SEQ ID NO: 3886 - DNA, 15 bp, synthetic construct
  source 1..15: mol_type = other DNA
ttgaggatgctgcac

SEQ ID NO: 3887 - DNA, 15 bp, synthetic construct
  source 1..15: mol_type = other DNA
gacatagcagccaca

SEQ ID NO: 3888 - DNA, 15 bp, synthetic construct
  source 1..15: mol_type = other DNA
aatcgttgtggtcac

SEQ ID NO: 3889 - DNA, 15 bp, synthetic construct
  source 1..15: mol_type = other DNA
ttcccatcgaaggtg

SEQ ID NO: 3890 - DNA, 15 bp, synthetic construct
  source 1..15: mol_type = other DNA
ggaagacctgcgagt

SEQ ID NO: 3891 - DNA, 15 bp, synthetic construct
  source 1..15: mol_type = other DNA
gtggtcctcttgtcc

SEQ ID NO: 3892 - DNA, 15 bp, synthetic construct
  source 1..15: mol_type = other DNA
ggacgcaagggcatt

SEQ ID NO: 3893 - DNA, 15 bp, synthetic construct
  source 1..15: mol_type = other DNA
tcgttcaggacacag

SEQ ID NO: 3894 - DNA, 15 bp, synthetic construct
  source 1..15: mol_type = other DNA
cacatcgggctggtt

SEQ ID NO: 3895 - DNA, 15 bp, synthetic construct
  source 1..15: mol_type = other DNA
gtgtccgtgcagcct

SEQ ID NO: 3896 - DNA, 15 bp, synthetic construct
  source 1..15: mol_type = other DNA
ggagcacgagtcgtg

SEQ ID NO: 3897 - DNA, 15 bp, synthetic construct
  source 1..15: mol_type = other DNA
cactgccatcggact

SEQ ID NO: 3898 - DNA, 15 bp, synthetic construct
  source 1..15: mol_type = other DNA
ggtgtcatccttgat

SEQ ID NO: 3899 - DNA, 15 bp, synthetic construct
  source 1..15: mol_type = other DNA
acactttgacacagg

SEQ ID NO: 3900 - DNA, 15 bp, synthetic construct
  source 1..15: mol_type = other DNA
atagcaatggccagc

SEQ ID NO: 3901 - DNA, 15 bp, synthetic construct
  source 1..15: mol_type = other DNA
gcgatgtcgtcgaag

SEQ ID NO: 3902 - DNA, 15 bp, synthetic construct
  source 1..15: mol_type = other DNA
cgtgtggtagatgac

SEQ ID NO: 3903 - DNA, 15 bp, synthetic construct
  source 1..15: mol_type = other DNA
ccatgggtgtcagct

SEQ ID NO: 3904 - DNA, 15 bp, synthetic construct
  source 1..15: mol_type = other DNA
gtcttcacagaagca

SEQ ID NO: 3905 - DNA, 15 bp, synthetic construct
  source 1..15: mol_type = other DNA
agagtgccgcgtaca

SEQ ID NO: 3906 - DNA, 15 bp, synthetic construct
  source 1..15: mol_type = other DNA
aaagtggttgtcctg

SEQ ID NO: 3907 - DNA, 15 bp, synthetic construct
  source 1..15: mol_type = other DNA
gtgtatggcacctcc

SEQ ID NO: 3908 - DNA, 15 bp, synthetic construct
  source 1..15: mol_type = other DNA
gacgagcacgcggaa

SEQ ID NO: 3909 - DNA, 15 bp, synthetic construct
  source 1..15: mol_type = other DNA
acaacacgaaaggag

SEQ ID NO: 3910 - DNA, 15 bp, synthetic construct
  source 1..15: mol_type = other DNA
cttgctgaagggcac

SEQ ID NO: 3911 - DNA, 15 bp, synthetic construct
  source 1..15: mol_type = other DNA
ggcgtatttggtgtc

SEQ ID NO: 3912 - DNA, 15 bp, synthetic construct
  source 1..15: mol_type = other DNA
aaggttgagggtctg

SEQ ID NO: 3913 - DNA, 15 bp, synthetic construct
  source 1..15: mol_type = other DNA
gttcaggaacacttc

SEQ ID NO: 3914 - DNA, 15 bp, synthetic construct
  source 1..15: mol_type = other DNA
tcatcaaagatggga

SEQ ID NO: 3915 - DNA, 15 bp, synthetic construct
  source 1..15: mol_type = other DNA
tccacatgaggacaa

SEQ ID NO: 3916 - DNA, 15 bp, synthetic construct
  source 1..15: mol_type = other DNA
gatgcgcgagaccac

SEQ ID NO: 3917 - DNA, 15 bp, synthetic construct
  source 1..15: mol_type = other DNA
cgtcattgacttggg

SEQ ID NO: 3918 - DNA, 15 bp, synthetic construct
  source 1..15: mol_type = other DNA
ggatgctgttgaagt

SEQ ID NO: 3919 - DNA, 15 bp, synthetic construct
  source 1..15: mol_type = other DNA
cagtcaaagaacacc

SEQ ID NO: 3920 - DNA, 15 bp, synthetic construct
  source 1..15: mol_type = other DNA
gtctccgttgaagct

SEQ ID NO: 3921 - DNA, 15 bp, synthetic construct
  source 1..15: mol_type = other DNA
gaagcgaccaccgtc

SEQ ID NO: 3922 - DNA, 15 bp, synthetic construct
  source 1..15: mol_type = other DNA
cttcccgtcaaacgt

SEQ ID NO: 3923 - DNA, 15 bp, synthetic construct
  source 1..15: mol_type = other DNA
tgtagatgacttccc

SEQ ID NO: 3924 - DNA, 15 bp, synthetic construct
  source 1..15: mol_type = other DNA
cggcactttggtagt

SEQ ID NO: 3925 - DNA, 15 bp, synthetic construct
  source 1..15: mol_type = other DNA
cactcagcaaagacc

SEQ ID NO: 3926 - DNA, 15 bp, synthetic construct
  source 1..15: mol_type = other DNA
gaacacacggatttc

SEQ ID NO: 3927 - DNA, 15 bp, synthetic construct
  source 1..15: mol_type = other DNA
gttgcaggcatcctc

SEQ ID NO: 3928 - DNA, 15 bp, synthetic construct
  source 1..15: mol_type = other DNA
gctgttgtggtcagc

SEQ ID NO: 3929 - DNA, 15 bp, synthetic construct
  source 1..15: mol_type = other DNA
ggaagggtggttgca

SEQ ID NO: 3930 - DNA, 15 bp, synthetic construct
  source 1..15: mol_type = other DNA
ggacatggtggacat

SEQ ID NO: 3931 - DNA, 15 bp, synthetic construct
  source 1..15: mol_type = other DNA
cgaacacagctgagg

SEQ ID NO: 3932 - DNA, 15 bp, synthetic construct
  source 1..15: mol_type = other DNA
gtcggcactttggta

SEQ ID NO: 3933 - DNA, 15 bp, synthetic construct
  source 1..15: mol_type = other DNA
taggtgtcaaagtcc

SEQ ID NO: 3934 - DNA, 15 bp, synthetic construct
  source 1..15: mol_type = other DNA
gttgtagcacatctt

SEQ ID NO: 3935 - DNA, 15 bp, synthetic construct
  source 1..15: mol_type = other DNA
cgtaggactcaacgt

SEQ ID NO: 3936 - DNA, 15 bp, synthetic construct
  source 1..15: mol_type = other DNA
cgctgaaggttggca

SEQ ID NO: 3937 - DNA, 15 bp, synthetic construct
  source 1..15: mol_type = other DNA
ggtgttgccatagaa

SEQ ID NO: 3938 - DNA, 15 bp, synthetic construct
  source 1..15: mol_type = other DNA
cccttgtcgtggtgg

SEQ ID NO: 3939 - DNA, 15 bp, synthetic construct
  source 1..15: mol_type = other DNA
tccgcagatggcgat

SEQ ID NO: 3940 - DNA, 15 bp, synthetic construct
  source 1..15: mol_type = other DNA
cagtgctgattgcac

SEQ ID NO: 3941 - DNA, 15 bp, synthetic construct
  source 1..15: mol_type = other DNA
gaggtgtggacagtc

SEQ ID NO: 3942 - DNA, 15 bp, synthetic construct
  source 1..15: mol_type = other DNA
agtgttggcgccagg

SEQ ID NO: 3943 - DNA, 15 bp, synthetic construct
  source 1..15: mol_type = other DNA
ctgtcctcataggtg

SEQ ID NO: 3944 - DNA, 15 bp, synthetic construct
  source 1..15: mol_type = other DNA
aggcgttgaagaatg

SEQ ID NO: 3945 - DNA, 15 bp, synthetic construct
  source 1..15: mol_type = other DNA
cgtagtggctgttgt

SEQ ID NO: 3946 - DNA, 15 bp, synthetic construct
  source 1..15: mol_type = other DNA
ttggtagtgtgagct

SEQ ID NO: 3947 - DNA, 15 bp, synthetic construct
  source 1..15: mol_type = other DNA
tgcttgtagaagctg

SEQ ID NO: 3948 - DNA, 15 bp, synthetic construct
  source 1..15: mol_type = other DNA
gctcgagttcctctt

SEQ ID NO: 3949 - DNA, 15 bp, synthetic construct
  source 1..15: mol_type = other DNA
caggatctcatcctc

SEQ ID NO: 3950 - DNA, 15 bp, synthetic construct
  source 1..15: mol_type = other DNA
tctggaacctcttct

SEQ ID NO: 3951 - DNA, 15 bp, synthetic construct
  source 1..15: mol_type = other DNA
actcagtcttgtcct

SEQ ID NO: 3952 - DNA, 15 bp, synthetic construct
  source 1..15: mol_type = other DNA
gacgtcgaagttgat

SEQ ID NO: 3953 - DNA, 15 bp, synthetic construct
  source 1..15: mol_type = other DNA
cgtctcttcatccag

SEQ ID NO: 3954 - DNA, 15 bp, synthetic construct
  source 1..15: mol_type = other DNA
aagtaccgctccctc

SEQ ID NO: 3955 - DNA, 15 bp, synthetic construct
  source 1..15: mol_type = other DNA
tcgtcactgagttgg

SEQ ID NO: 3956 - DNA, 15 bp, synthetic construct
  source 1..15: mol_type = other DNA
ccagctccttaagct

SEQ ID NO: 3957 - DNA, 15 bp, synthetic construct
  source 1..15: mol_type = other DNA
ataccaccttcaata

SEQ ID NO: 3958 - DNA, 15 bp, synthetic construct
  source 1..15: mol_type = other DNA
ttcttgcccttgtgg

SEQ ID NO: 3959 - DNA, 15 bp, synthetic construct
  source 1..15: mol_type = other DNA
acatcgcctggaagg

SEQ ID NO: 3960 - DNA, 15 bp, synthetic construct
  source 1..15: mol_type = other DNA
gaggaggcattgagc

SEQ ID NO: 3961 - DNA, 15 bp, synthetic construct
  source 1..15: mol_type = other DNA
atacgaggagtgagg

SEQ ID NO: 3962 - DNA, 15 bp, synthetic construct
  source 1..15: mol_type = other DNA
cattgttcttctgag

SEQ ID NO: 3963 - DNA, 15 bp, synthetic construct
  source 1..15: mol_type = other DNA
tcatcagcttgccca

SEQ ID NO: 3964 - DNA, 15 bp, synthetic construct
  source 1..15: mol_type = other DNA
gccaggatctcgtag

SEQ ID NO: 3965 - DNA, 15 bp, synthetic construct
  source 1..15: mol_type = other DNA
ctctcctcaaggagt

SEQ ID NO: 3966 - DNA, 15 bp, synthetic construct
  source 1..15: mol_type = other DNA
gacgatcttctccga

SEQ ID NO: 3967 - DNA, 15 bp, synthetic construct
  source 1..15: mol_type = other DNA
gcccgtgatttttct

SEQ ID NO: 3968 - DNA, 15 bp, synthetic construct
  source 1..15: mol_type = other DNA
gaaaaggcgctcata

SEQ ID NO: 3969 - DNA, 15 bp, synthetic construct
  source 1..15: mol_type = other DNA
gaaggtgtagttgtt

SEQ ID NO: 3970 - DNA, 15 bp, synthetic construct
  source 1..15: mol_type = other DNA
gaatcaccttcatgg

SEQ ID NO: 3971 - DNA, 15 bp, synthetic construct
  source 1..15: mol_type = other DNA
tccaccttcatgtgc

SEQ ID NO: 3972 - DNA, 15 bp, synthetic construct
  source 1..15: mol_type = other DNA
tagccatggatgctg

SEQ ID NO: 3973 - DNA, 15 bp, synthetic construct
  source 1..15: mol_type = other DNA
ggtgaccctgttgag

SEQ ID NO: 3974 - DNA, 15 bp, synthetic construct
  source 1..15: mol_type = other DNA
gaggacagtcttcca

SEQ ID NO: 3975 - DNA, 15 bp, synthetic construct
  source 1..15: mol_type = other DNA
cacgtcttgttggct

SEQ ID NO: 3976 - DNA, 15 bp, synthetic construct
  source 1..15: mol_type = other DNA
aatgtcgtagaagtc

SEQ ID NO: 3977 - DNA, 15 bp, synthetic construct
  source 1..15: mol_type = other DNA
ggagagtttcttggc

SEQ ID NO: 3978 - DNA, 15 bp, synthetic construct
  source 1..15: mol_type = other DNA
agagaaatagggttt

SEQ ID NO: 3979 - DNA, 15 bp, synthetic construct
  source 1..15: mol_type = other DNA
tcacagtcgcatcac

SEQ ID NO: 3980 - DNA, 15 bp, synthetic construct
  source 1..15: mol_type = other DNA
tcactgtccggtaat

SEQ ID NO: 3981 - DNA, 15 bp, synthetic construct
  source 1..15: mol_type = other DNA
tgcacgtacacggaa

SEQ ID NO: 3982 - DNA, 15 bp, synthetic construct
  source 1..15: mol_type = other DNA
taccgttgtgagttc

SEQ ID NO: 3983 - DNA, 15 bp, synthetic construct
  source 1..15: mol_type = other DNA
gcacaaggtgtgcca

SEQ ID NO: 3984 - DNA, 15 bp, synthetic construct
  source 1..15: mol_type = other DNA
ctgtaggactgtaca

SEQ ID NO: 3985 - DNA, 15 bp, synthetic construct
  source 1..15: mol_type = other DNA
gccataccaggacag

SEQ ID NO: 3986 - DNA, 15 bp, synthetic construct
  source 1..15: mol_type = other DNA
cctctgtcctcaggc

SEQ ID NO: 3987 - DNA, 15 bp, synthetic construct
  source 1..15: mol_type = other DNA
atctagcagcacttc

SEQ ID NO: 3988 - DNA, 15 bp, synthetic construct
  source 1..15: mol_type = other DNA
tggattttccttgct

SEQ ID NO: 3989 - DNA, 15 bp, synthetic construct
  source 1..15: mol_type = other DNA
atcaggttcacttta

SEQ ID NO: 3990 - DNA, 15 bp, synthetic construct
  source 1..15: mol_type = other DNA
cctggatggtaggtg

SEQ ID NO: 3991 - DNA, 15 bp, synthetic construct
  source 1..15: mol_type = other DNA
tgaacatgagcttct

SEQ ID NO: 3992 - DNA, 15 bp, synthetic construct
  source 1..15: mol_type = other DNA
gatgatggttggtgg

SEQ ID NO: 3993 - DNA, 15 bp, synthetic construct
  source 1..15: mol_type = other DNA
acacacaatcacggc

SEQ ID NO: 3994 - DNA, 15 bp, synthetic construct
  source 1..15: mol_type = other DNA
gtaaatgccggcgtc

SEQ ID NO: 3995 - DNA, 15 bp, synthetic construct
  source 1..15: mol_type = other DNA
ccactgagatccgct

SEQ ID NO: 3996 - DNA, 15 bp, synthetic construct
  source 1..15: mol_type = other DNA
ctgcccaatgcggtt

SEQ ID NO: 3997 - DNA, 15 bp, synthetic construct
  source 1..15: mol_type = other DNA
ggagaaccaggagat

SEQ ID NO: 3998 - DNA, 15 bp, synthetic construct
  source 1..15: mol_type = other DNA
atttgaggatgggca

SEQ ID NO: 3999 - DNA, 15 bp, synthetic construct
  source 1..15: mol_type = other DNA
attctcagagtctgg

SEQ ID NO: 4000 - DNA, 15 bp, synthetic construct
  source 1..15: mol_type = other DNA
tttcgggcttcaggc

SEQ ID NO: 4001 - DNA, 15 bp, synthetic construct
  source 1..15: mol_type = other DNA
agatggtgagggtgg

SEQ ID NO: 4002 - DNA, 15 bp, synthetic construct
  source 1..15: mol_type = other DNA
cacagcgataagtgc

SEQ ID NO: 4003 - DNA, 15 bp, synthetic construct
  source 1..15: mol_type = other DNA
agcattccagtccag

SEQ ID NO: 4004 - DNA, 15 bp, synthetic construct
  source 1..15: mol_type = other DNA
tggaatgccatactt

SEQ ID NO: 4005 - DNA, 15 bp, synthetic construct
  source 1..15: mol_type = other DNA
tgctcctctaattcc

SEQ ID NO: 4006 - DNA, 15 bp, synthetic construct
  source 1..15: mol_type = other DNA
agatagtgtctgatg

SEQ ID NO: 4007 - DNA, 15 bp, synthetic construct
  source 1..15: mol_type = other DNA
ggacaggactatgaa

SEQ ID NO: 4008 - DNA, 15 bp, synthetic construct
  source 1..15: mol_type = other DNA
catatgtgattttgg

SEQ ID NO: 4009 - DNA, 15 bp, synthetic construct
  source 1..15: mol_type = other DNA
tccactcggaggaga

SEQ ID NO: 4010 - DNA, 15 bp, synthetic construct
  source 1..15: mol_type = other DNA
cctctgactcactgc

SEQ ID NO: 4011 - DNA, 15 bp, synthetic construct
  source 1..15: mol_type = other DNA
accagggtgacggac

SEQ ID NO: 4012 - DNA, 15 bp, synthetic construct
  source 1..15: mol_type = other DNA
cgggatgtagaattg

SEQ ID NO: 4013 - DNA, 15 bp, synthetic construct
  source 1..15: mol_type = other DNA
cgctgtacgtggctg

SEQ ID NO: 4014 - DNA, 15 bp, synthetic construct
  source 1..15: mol_type = other DNA
accacactagagcca

SEQ ID NO: 4015 - DNA, 15 bp, synthetic construct
  source 1..15: mol_type = other DNA
tgtattgccctgcca

SEQ ID NO: 4016 - DNA, 15 bp, synthetic construct
  source 1..15: mol_type = other DNA
tagaaggtcaccttc

SEQ ID NO: 4017 - DNA, 15 bp, synthetic construct
  source 1..15: mol_type = other DNA
tccttcaaagtgcag

SEQ ID NO: 4018 - DNA, 15 bp, synthetic construct
  source 1..15: mol_type = other DNA
gtctgtgtgttcagc

SEQ ID NO: 4019 - DNA, 15 bp, synthetic construct
  source 1..15: mol_type = other DNA
agtaagaacatgctt

SEQ ID NO: 4020 - DNA, 15 bp, synthetic construct
  source 1..15: mol_type = other DNA
tccaggatgaaccga

SEQ ID NO: 4021 - DNA, 15 bp, synthetic construct
  source 1..15: mol_type = other DNA
aatggaatgccagtg

SEQ ID NO: 4022 - DNA, 15 bp, synthetic construct
  source 1..15: mol_type = other DNA
ttttcctttggaacc

SEQ ID NO: 4023 - DNA, 15 bp, synthetic construct
  source 1..15: mol_type = other DNA
cagatccacccatgg

SEQ ID NO: 4024 - DNA, 15 bp, synthetic construct
  source 1..15: mol_type = other DNA
ccatttctgtcctgg

SEQ ID NO: 4025 - DNA, 15 bp, synthetic construct
  source 1..15: mol_type = other DNA
gctaaggcaacacaa

SEQ ID NO: 4026 - DNA, 15 bp, synthetic construct
  source 1..15: mol_type = other DNA
gattccagtggtacc

SEQ ID NO: 4027 - DNA, 15 bp, synthetic construct
  source 1..15: mol_type = other DNA
gcgttcagtccgtgc

SEQ ID NO: 4028 - DNA, 15 bp, synthetic construct
  source 1..15: mol_type = other DNA
ctaatactggcagcg

SEQ ID NO: 4029 - DNA, 15 bp, synthetic construct
  source 1..15: mol_type = other DNA
caatttaaaacgctc

SEQ ID NO: 4030 - DNA, 15 bp, synthetic construct
  source 1..15: mol_type = other DNA
ggcgtgcctctaatc

SEQ ID NO: 4031 - DNA, 15 bp, synthetic construct
  source 1..15: mol_type = other DNA
gtaaggcggactggg

SEQ ID NO: 4032 - DNA, 15 bp, synthetic construct
  source 1..15: mol_type = other DNA
ttcgtgtttgaaaga

SEQ ID NO: 4033 - DNA, 15 bp, synthetic construct
  source 1..15: mol_type = other DNA
ttggtcatgtttcga

SEQ ID NO: 4034 - DNA, 15 bp, synthetic construct
  source 1..15: mol_type = other DNA
caagtagtaaaatgc

SEQ ID NO: 4035 - DNA, 15 bp, synthetic construct
  source 1..15: mol_type = other DNA
agggctttcaaagaa

SEQ ID NO: 4036 - DNA, 15 bp, synthetic construct
  source 1..15: mol_type = other DNA
tgtgaatggctatcg

SEQ ID NO: 4037 - DNA, 15 bp, synthetic construct
  source 1..15: mol_type = other DNA
ttcgaggtcgtcctc

SEQ ID NO: 4038 - DNA, 15 bp, synthetic construct
  source 1..15: mol_type = other DNA
aggcagaaaagtccg

SEQ ID NO: 4039 - DNA, 15 bp, synthetic construct
  source 1..15: mol_type = other DNA
ccaagcgcagagtct

SEQ ID NO: 4040 - DNA, 15 bp, synthetic construct
  source 1..15: mol_type = other DNA
agtgggttcgtttcc

SEQ ID NO: 4041 - DNA, 15 bp, synthetic construct
  source 1..15: mol_type = other DNA
ctgaacgaaggagac

SEQ ID NO: 4042 - DNA, 15 bp, synthetic construct
  source 1..15: mol_type = other DNA
tcttcttctttttgg

SEQ ID NO: 4043 - DNA, 15 bp, synthetic construct
  source 1..15: mol_type = other DNA
gatctcgcagcgagg

SEQ ID NO: 4044 - DNA, 15 bp, synthetic construct
  source 1..15: mol_type = other DNA
agcagtagtacccaa

SEQ ID NO: 4045 - DNA, 15 bp, synthetic construct
  source 1..15: mol_type = other DNA
gtggaagacatggga

SEQ ID NO: 4046 - DNA, 15 bp, synthetic construct
  source 1..15: mol_type = other DNA
tttgatcgtcatcct

SEQ ID NO: 4047 - DNA, 15 bp, synthetic construct
  source 1..15: mol_type = other DNA
aggcagtaatgacaa

SEQ ID NO: 4048 - DNA, 15 bp, synthetic construct
  source 1..15: mol_type = other DNA
tagagagcgatgagc

SEQ ID NO: 4049 - DNA, 15 bp, synthetic construct
  source 1..15: mol_type = other DNA
ccattctagtattct

SEQ ID NO: 4050 - DNA, 15 bp, synthetic construct
  source 1..15: mol_type = other DNA
cacttggacagtggg

SEQ ID NO: 4051 - DNA, 15 bp, synthetic construct
  source 1..15: mol_type = other DNA
ggtcgccaagttcag

SEQ ID NO: 4052 - DNA, 15 bp, synthetic construct
  source 1..15: mol_type = other DNA
agtgcacgaggagaa

SEQ ID NO: 4053 - DNA, 15 bp, synthetic construct
  source 1..15: mol_type = other DNA
ctttcgccgactccg

SEQ ID NO: 4054 - DNA, 15 bp, synthetic construct
  source 1..15: mol_type = other DNA
cccagatgtagttgt

SEQ ID NO: 4055 - DNA, 15 bp, synthetic construct
  source 1..15: mol_type = other DNA
actttgcaatgccca

SEQ ID NO: 4056 - DNA, 15 bp, synthetic construct
  source 1..15: mol_type = other DNA
gcagacagacttgag

SEQ ID NO: 4057 - DNA, 15 bp, synthetic construct
  source 1..15: mol_type = other DNA
tgattgggagtagag

SEQ ID NO: 4058 - DNA, 15 bp, synthetic construct
  source 1..15: mol_type = other DNA
tcgctcttaggccgg

SEQ ID NO: 4059 - DNA, 15 bp, synthetic construct
  source 1..15: mol_type = other DNA
ttaaggcagagtgag

SEQ ID NO: 4060 - DNA, 15 bp, synthetic construct
  source 1..15: mol_type = other DNA
tctgagaaagccaga

SEQ ID NO: 4061 - DNA, 15 bp, synthetic construct
  source 1..15: mol_type = other DNA
cttttgagggccgcc

SEQ ID NO: 4062 - DNA, 15 bp, synthetic construct
  source 1..15: mol_type = other DNA
atcacattggaggag

SEQ ID NO: 4063 - DNA, 15 bp, synthetic construct
  source 1..15: mol_type = other DNA
ggatagctgagaccc

SEQ ID NO: 4064 - DNA, 15 bp, synthetic construct
  source 1..15: mol_type = other DNA
acaacgctcaaaact

SEQ ID NO: 4065 - DNA, 15 bp, synthetic construct
  source 1..15: mol_type = other DNA
cggtgctcaaagcaa

SEQ ID NO: 4066 - DNA, 15 bp, synthetic construct
  source 1..15: mol_type = other DNA
gctgaaggtctgcgt

SEQ ID NO: 4067 - DNA, 15 bp, synthetic construct
  source 1..15: mol_type = other DNA
gaaagagagaacagc

SEQ ID NO: 4068 - DNA, 15 bp, synthetic construct
  source 1..15: mol_type = other DNA
agcaaaggctgcggt

SEQ ID NO: 4069 - DNA, 15 bp, synthetic construct
  source 1..15: mol_type = other DNA
gtgtcagtgagaacc

SEQ ID NO: 4070 - DNA, 15 bp, synthetic construct
  source 1..15: mol_type = other DNA
ctctaggcggtttcc

SEQ ID NO: 4071 - DNA, 15 bp, synthetic construct
  source 1..15: mol_type = other DNA
aatcggaccttgtag

SEQ ID NO: 4072 - DNA, 15 bp, synthetic construct
  source 1..15: mol_type = other DNA
gtccaggtagtactt

SEQ ID NO: 4073 - DNA, 15 bp, synthetic construct
  source 1..15: mol_type = other DNA
cgtcttcaggcctcc

SEQ ID NO: 4074 - DNA, 15 bp, synthetic construct
  source 1..15: mol_type = other DNA
ccacagacgtatatg

SEQ ID NO: 4075 - DNA, 15 bp, synthetic construct
  source 1..15: mol_type = other DNA
ttgtggacattggat

SEQ ID NO: 4076 - DNA, 15 bp, synthetic construct
  source 1..15: mol_type = other DNA
agcatgttggacacg

SEQ ID NO: 4077 - DNA, 15 bp, synthetic construct
  source 1..15: mol_type = other DNA
gcctgtatccggttg

SEQ ID NO: 4078 - DNA, 15 bp, synthetic construct
  source 1..15: mol_type = other DNA
cacagaagacatcac

SEQ ID NO: 4079 - DNA, 15 bp, synthetic construct
  source 1..15: mol_type = other DNA
acatgcgtgttccag

SEQ ID NO: 4080 - DNA, 15 bp, synthetic construct
  source 1..15: mol_type = other DNA
tctctttgttcacct

SEQ ID NO: 4081 - DNA, 15 bp, synthetic construct
  source 1..15: mol_type = other DNA
tgaacatcccgtggg

SEQ ID NO: 4082 - DNA, 15 bp, synthetic construct
  source 1..15: mol_type = other DNA
agtgaggtgcacttc

SEQ ID NO: 4083 - DNA, 15 bp, synthetic construct
  source 1..15: mol_type = other DNA
tgtttgaagatctca

SEQ ID NO: 4084 - DNA, 15 bp, synthetic construct
  source 1..15: mol_type = other DNA
cttgccgtctgtcct

SEQ ID NO: 4085 - DNA, 15 bp, synthetic construct
  source 1..15: mol_type = other DNA
acttgccgtccaaat

SEQ ID NO: 4086 - DNA, 15 bp, synthetic construct
  source 1..15: mol_type = other DNA
ggccaaaaactgaga

SEQ ID NO: 4087 - DNA, 15 bp, synthetic construct
  source 1..15: mol_type = other DNA
gcattcacgaggtcc

SEQ ID NO: 4088 - DNA, 15 bp, synthetic construct
  source 1..15: mol_type = other DNA
atgtctaagttcatc

SEQ ID NO: 4089 - DNA, 15 bp, synthetic construct
  source 1..15: mol_type = other DNA
ccgggagtaagccgt

SEQ ID NO: 4090 - DNA, 15 bp, synthetic construct
  source 1..15: mol_type = other DNA
ggtcgttctccacgc

SEQ ID NO: 4091 - DNA, 15 bp, synthetic construct
  source 1..15: mol_type = other DNA
gtcaacaatggtcac

SEQ ID NO: 4092 - DNA, 15 bp, synthetic construct
  source 1..15: mol_type = other DNA
catattcttccatgg

SEQ ID NO: 4093 - DNA, 15 bp, synthetic construct
  source 1..15: mol_type = other DNA
gggaaggtcatgatg

SEQ ID NO: 4094 - DNA, 15 bp, synthetic construct
  source 1..15: mol_type = other DNA
tggtttgcacaagga

SEQ ID NO: 4095 - DNA, 15 bp, synthetic construct
  source 1..15: mol_type = other DNA
ggaaggacttgggaa

SEQ ID NO: 4096 - DNA, 15 bp, synthetic construct
  source 1..15: mol_type = other DNA
tcagtaggtcaaatg

SEQ ID NO: 4097 - DNA, 15 bp, synthetic construct
  source 1..15: mol_type = other DNA
tttgcgcttcagcct

SEQ ID NO: 4098 - DNA, 15 bp, synthetic construct
  source 1..15: mol_type = other DNA
tagatgagtcacgga

SEQ ID NO: 4099 - DNA, 15 bp, synthetic construct
  source 1..15: mol_type = other DNA
atggcatctatctcc

SEQ ID NO: 4100 - DNA, 15 bp, synthetic construct
  source 1..15: mol_type = other DNA
ctcaggcatgtgact

SEQ ID NO: 4101 - DNA, 15 bp, synthetic construct
  source 1..15: mol_type = other DNA
aatagagtgtgacaa

SEQ ID NO: 4102 - DNA, 15 bp, synthetic construct
  source 1..15: mol_type = other DNA
accaaaggaagggca

SEQ ID NO: 4103 - DNA, 15 bp, synthetic construct
  source 1..15: mol_type = other DNA
atggtgcattgtgac

SEQ ID NO: 4104 - DNA, 15 bp, synthetic construct
  source 1..15: mol_type = other DNA
tctctcttttttgca

SEQ ID NO: 4105 - DNA, 15 bp, synthetic construct
  source 1..15: mol_type = other DNA
tggtaggtatccagg

SEQ ID NO: 4106 - DNA, 15 bp, synthetic construct
  source 1..15: mol_type = other DNA
gactgcttaggagaa

SEQ ID NO: 4107 - DNA, 15 bp, synthetic construct
  source 1..15: mol_type = other DNA
ggtcagaggacatac

SEQ ID NO: 4108 - DNA, 15 bp, synthetic construct
  source 1..15: mol_type = other DNA
agtggaaggcttctc

SEQ ID NO: 4109 - DNA, 15 bp, synthetic construct
  source 1..15: mol_type = other DNA
tatcgaagctgaacg

SEQ ID NO: 4110 - DNA, 15 bp, synthetic construct
  source 1..15: mol_type = other DNA
agtgagggatcgatg

SEQ ID NO: 4111 - DNA, 15 bp, synthetic construct
  source 1..15: mol_type = other DNA
tgaaccaagttccca

SEQ ID NO: 4112 - DNA, 15 bp, synthetic construct
  source 1..15: mol_type = other DNA
gccttttccgcttct

SEQ ID NO: 4113 - DNA, 15 bp, synthetic construct
  source 1..15: mol_type = other DNA
tatcagggttaggtg

SEQ ID NO: 4114 - DNA, 15 bp, synthetic construct
  source 1..15: mol_type = other DNA
agcaaaaagattgag

SEQ ID NO: 4115 - DNA, 15 bp, synthetic construct
  source 1..15: mol_type = other DNA
ggagagaagactgca

SEQ ID NO: 4116 - DNA, 15 bp, synthetic construct
  source 1..15: mol_type = other DNA
ctgaatccaaggcaa

SEQ ID NO: 4117 - DNA, 15 bp, synthetic construct
  source 1..15: mol_type = other DNA
tcatcgctgggacac

SEQ ID NO: 4118 - DNA, 15 bp, synthetic construct
  source 1..15: mol_type = other DNA
ggctccactagtgct

SEQ ID NO: 4119 - DNA, 15 bp, synthetic construct
  source 1..15: mol_type = other DNA
gacaccgtgacgaag

SEQ ID NO: 4120 - DNA, 15 bp, synthetic construct
  source 1..15: mol_type = other DNA
tgcgaaatagccaga

SEQ ID NO: 4121 - DNA, 15 bp, synthetic construct
  source 1..15: mol_type = other DNA
actacatggtatttc

SEQ ID NO: 4122 - DNA, 15 bp, synthetic construct
  source 1..15: mol_type = other DNA
tctcacaagttggat

SEQ ID NO: 4123 - DNA, 15 bp, synthetic construct
  source 1..15: mol_type = other DNA
cacggcaacagtagg

SEQ ID NO: 4124 - DNA, 15 bp, synthetic construct
  source 1..15: mol_type = other DNA
attcctctgaagggt

SEQ ID NO: 4125 - DNA, 15 bp, synthetic construct
  source 1..15: mol_type = other DNA
tgtcatctgtcccaa

SEQ ID NO: 4126 - DNA, 15 bp, synthetic construct
  source 1..15: mol_type = other DNA
tctttagggcaccat

SEQ ID NO: 4127 - DNA, 15 bp, synthetic construct
  source 1..15: mol_type = other DNA
aagtattcagatcct

SEQ ID NO: 4128 - DNA, 15 bp, synthetic construct
  source 1..15: mol_type = other DNA
agagacagctccatt

SEQ ID NO: 4129 - DNA, 15 bp, synthetic construct
  source 1..15: mol_type = other DNA
agtcgatatggaatt

SEQ ID NO: 4130 - DNA, 15 bp, synthetic construct
  source 1..15: mol_type = other DNA
cataattgatgtgga

SEQ ID NO: 4131 - DNA, 15 bp, synthetic construct
  source 1..15: mol_type = other DNA
catagaggaaggcac

SEQ ID NO: 4132 - DNA, 15 bp, synthetic construct
  source 1..15: mol_type = other DNA
aagctcatctcgctc

SEQ ID NO: 4133 - DNA, 15 bp, synthetic construct
  source 1..15: mol_type = other DNA
taatcagccgatttc

SEQ ID NO: 4134 - DNA, 15 bp, synthetic construct
  source 1..15: mol_type = other DNA
ccacttatacgtgat

SEQ ID NO: 4135 - DNA, 15 bp, synthetic construct
  source 1..15: mol_type = other DNA
agacaacgttctgga

SEQ ID NO: 4136 - DNA, 15 bp, synthetic construct
  source 1..15: mol_type = other DNA
aagtacaggaagcca

SEQ ID NO: 4137 - DNA, 15 bp, synthetic construct
  source 1..15: mol_type = other DNA
gtagagcacgaggcc

SEQ ID NO: 4138 - DNA, 15 bp, synthetic construct
  source 1..15: mol_type = other DNA
tcagaactttcaagc

SEQ ID NO: 4139 - DNA, 15 bp, synthetic construct
  source 1..15: mol_type = other DNA
tctttctgaacagtg

SEQ ID NO: 4140 - DNA, 15 bp, synthetic construct
  source 1..15: mol_type = other DNA
tagtcacccaagcct

SEQ ID NO: 4141 - DNA, 15 bp, synthetic construct
  source 1..15: mol_type = other DNA
aagtcagaagcacac

SEQ ID NO: 4142 - DNA, 15 bp, synthetic construct
  source 1..15: mol_type = other DNA
actttgagctcataa

SEQ ID NO: 4143 - DNA, 15 bp, synthetic construct
  source 1..15: mol_type = other DNA
ttgcaacaagctcct

SEQ ID NO: 4144 - DNA, 15 bp, synthetic construct
  source 1..15: mol_type = other DNA
tgtgacagattttgt

SEQ ID NO: 4145 - DNA, 15 bp, synthetic construct
  source 1..15: mol_type = other DNA
gtagcatgcatacaa

SEQ ID NO: 4146 - DNA, 15 bp, synthetic construct
  source 1..15: mol_type = other DNA
tcatacagctgccgt

SEQ ID NO: 4147 - DNA, 15 bp, synthetic construct
  source 1..15: mol_type = other DNA
cctctttccttcagc

SEQ ID NO: 4148 - DNA, 15 bp, synthetic construct
  source 1..15: mol_type = other DNA
ttgttttgggtgaat

SEQ ID NO: 4149 - DNA, 15 bp, synthetic construct
  source 1..15: mol_type = other DNA
tccaagagggaacat

SEQ ID NO: 4150 - DNA, 15 bp, synthetic construct
  source 1..15: mol_type = other DNA
tatttacaagactgc

SEQ ID NO: 4151 - DNA, 15 bp, synthetic construct
  source 1..15: mol_type = other DNA
ccacgatttctcggc

SEQ ID NO: 4152 - DNA, 15 bp, synthetic construct
  source 1..15: mol_type = other DNA
gaaagagctgaagcc

SEQ ID NO: 4153 - DNA, 15 bp, synthetic construct
  source 1..15: mol_type = other DNA
ttctagtgaagcctc

SEQ ID NO: 4154 - DNA, 15 bp, synthetic construct
  source 1..15: mol_type = other DNA
tctctagtgtggtag

SEQ ID NO: 4155 - DNA, 15 bp, synthetic construct
  source 1..15: mol_type = other DNA
ctaagctgcggctgg

SEQ ID NO: 4156 - DNA, 15 bp, synthetic construct
  source 1..15: mol_type = other DNA
tccctagacgccata

SEQ ID NO: 4157 - DNA, 15 bp, synthetic construct
  source 1..15: mol_type = other DNA
caatacagtcctttg

SEQ ID NO: 4158 - DNA, 15 bp, synthetic construct
  source 1..15: mol_type = other DNA
tgttgacgtacatgt

SEQ ID NO: 4159 - DNA, 15 bp, synthetic construct
  source 1..15: mol_type = other DNA
tcagtgtaagaaatg

SEQ ID NO: 4160 - DNA, 15 bp, synthetic construct
  source 1..15: mol_type = other DNA
tcttctgagctgcct

SEQ ID NO: 4161 - DNA, 15 bp, synthetic construct
  source 1..15: mol_type = other DNA
tctccagttgagctg

SEQ ID NO: 4162 - DNA, 15 bp, synthetic construct
  source 1..15: mol_type = other DNA
taaacagcttactgg

SEQ ID NO: 4163 - DNA, 15 bp, synthetic construct
  source 1..15: mol_type = other DNA
cagctgtatgaccag

SEQ ID NO: 4164 - DNA, 15 bp, synthetic construct
  source 1..15: mol_type = other DNA
ttagctggagccgct

SEQ ID NO: 4165 - DNA, 15 bp, synthetic construct
  source 1..15: mol_type = other DNA
tggcatacagaaccc

SEQ ID NO: 4166 - DNA, 15 bp, synthetic construct
  source 1..15: mol_type = other DNA
gtgcctcatctacag

SEQ ID NO: 4167 - DNA, 15 bp, synthetic construct
  source 1..15: mol_type = other DNA
agccggtgaaattgg

SEQ ID NO: 4168 - DNA, 15 bp, synthetic construct
  source 1..15: mol_type = other DNA
cactctgtccacggg

SEQ ID NO: 4169 - DNA, 15 bp, synthetic construct
  source 1..15: mol_type = other DNA
gagaactcaccaaat

SEQ ID NO: 4170 - DNA, 15 bp, synthetic construct
  source 1..15: mol_type = other DNA
ggtgctacatggatg

SEQ ID NO: 4171 - DNA, 15 bp, synthetic construct
  source 1..15: mol_type = other DNA
tcggacagttaggtt

SEQ ID NO: 4172 - DNA, 15 bp, synthetic construct
  source 1..15: mol_type = other DNA
ctaggagaaatgaga

SEQ ID NO: 4173 - DNA, 15 bp, synthetic construct
  source 1..15: mol_type = other DNA
tctctaccaagagag

SEQ ID NO: 4174 - DNA, 15 bp, synthetic construct
  source 1..15: mol_type = other DNA
tgcacatatgctcca

SEQ ID NO: 4175 - DNA, 15 bp, synthetic construct
  source 1..15: mol_type = other DNA
accgcccagacgact

SEQ ID NO: 4176 - DNA, 15 bp, synthetic construct
  source 1..15: mol_type = other DNA
aatggtggcatactc

SEQ ID NO: 4177 - DNA, 15 bp, synthetic construct
  source 1..15: mol_type = other DNA
ggaagtcacgcccgt

SEQ ID NO: 4178 - DNA, 15 bp, synthetic construct
  source 1..15: mol_type = other DNA
ggatgccactgccag

SEQ ID NO: 4179 - DNA, 15 bp, synthetic construct
  source 1..15: mol_type = other DNA
gctctccgatgtgtt

SEQ ID NO: 4180 - DNA, 15 bp, synthetic construct
  source 1..15: mol_type = other DNA
ctcccgagtggtgtg

SEQ ID NO: 4181 - DNA, 15 bp, synthetic construct
  source 1..15: mol_type = other DNA
ccgctgtcattgcgc

SEQ ID NO: 4182 - DNA, 15 bp, synthetic construct
  source 1..15: mol_type = other DNA
tccctgaaacttctc

SEQ ID NO: 4183 - DNA, 15 bp, synthetic construct
  source 1..15: mol_type = other DNA
caaggagagctccca

SEQ ID NO: 4184 - DNA, 15 bp, synthetic construct
  source 1..15: mol_type = other DNA
gctgcaattccaggc

SEQ ID NO: 4185 - DNA, 15 bp, synthetic construct
  source 1..15: mol_type = other DNA
tcttagggctatcac

SEQ ID NO: 4186 - DNA, 15 bp, synthetic construct
  source 1..15: mol_type = other DNA
tgaacagccaaaagg

SEQ ID NO: 4187 - DNA, 15 bp, synthetic construct
  source 1..15: mol_type = other DNA
ccgagttacccttct

SEQ ID NO: 4188 - DNA, 15 bp, synthetic construct
  source 1..15: mol_type = other DNA
cctcacttggacttg

SEQ ID NO: 4189 - DNA, 15 bp, synthetic construct
  source 1..15: mol_type = other DNA
ccaggatacttctgc

SEQ ID NO: 4190 - DNA, 15 bp, synthetic construct
  source 1..15: mol_type = other DNA
aagttgcattccagg

SEQ ID NO: 4191 - DNA, 15 bp, synthetic construct
  source 1..15: mol_type = other DNA
tgccgtaacatgaga

SEQ ID NO: 4192 - DNA, 15 bp, synthetic construct
  source 1..15: mol_type = other DNA
aaagtaagttccctc

SEQ ID NO: 4193 - DNA, 15 bp, synthetic construct
  source 1..15: mol_type = other DNA
tagtcccaggcgacc

SEQ ID NO: 4194 - DNA, 15 bp, synthetic construct
  source 1..15: mol_type = other DNA
gtagctccaacccag

SEQ ID NO: 4195 - DNA, 15 bp, synthetic construct
  source 1..15: mol_type = other DNA
ccacctatgtaagtc

SEQ ID NO: 4196 - DNA, 15 bp, synthetic construct
  source 1..15: mol_type = other DNA
ctggtagaggccttc

SEQ ID NO: 4197 - DNA, 15 bp, synthetic construct
  source 1..15: mol_type = other DNA
gggtaacaaaaaagc

SEQ ID NO: 4198 - DNA, 15 bp, synthetic construct
  source 1..15: mol_type = other DNA
ttgttcagagtccag

SEQ ID NO: 4199 - DNA, 15 bp, synthetic construct
  source 1..15: mol_type = other DNA
agcaagaaggatcct

SEQ ID NO: 4200 - DNA, 15 bp, synthetic construct
  source 1..15: mol_type = other DNA
ttccttagggactgt

SEQ ID NO: 4201 - DNA, 15 bp, synthetic construct
  source 1..15: mol_type = other DNA
gcagccaagttggat

SEQ ID NO: 4202 - DNA, 15 bp, synthetic construct
  source 1..15: mol_type = other DNA
cttctagtacccaga

SEQ ID NO: 4203 - DNA, 15 bp, synthetic construct
  source 1..15: mol_type = other DNA
ggcaagtttcatggc

SEQ ID NO: 4204 - DNA, 15 bp, synthetic construct
  source 1..15: mol_type = other DNA
ggctgttattgctcc

SEQ ID NO: 4205 - DNA, 15 bp, synthetic construct
  source 1..15: mol_type = other DNA
gaagtttctgccagg

SEQ ID NO: 4206 - DNA, 15 bp, synthetic construct
  source 1..15: mol_type = other DNA
tgcttaaagccatag

SEQ ID NO: 4207 - DNA, 15 bp, synthetic construct
  source 1..15: mol_type = other DNA
gttgtggtgacaggt

SEQ ID NO: 4208 - DNA, 15 bp, synthetic construct
  source 1..15: mol_type = other DNA
tgctacggacgctcc

SEQ ID NO: 4209 - DNA, 15 bp, synthetic construct
  source 1..15: mol_type = other DNA
catgggctgtaagtg

SEQ ID NO: 4210 - DNA, 15 bp, synthetic construct
  source 1..15: mol_type = other DNA
gttatctagcaggag

SEQ ID NO: 4211 - DNA, 15 bp, synthetic construct
  source 1..15: mol_type = other DNA
cggtgggatcagcag

SEQ ID NO: 4212 - DNA, 15 bp, synthetic construct
  source 1..15: mol_type = other DNA
ggtctccctcgacct

SEQ ID NO: 4213 - DNA, 15 bp, synthetic construct
  source 1..15: mol_type = other DNA
aacctagcgcgccgt

SEQ ID NO: 4214 - DNA, 15 bp, synthetic construct
  source 1..15: mol_type = other DNA
gttccgggacatggt

SEQ ID NO: 4215 - DNA, 15 bp, synthetic construct
  source 1..15: mol_type = other DNA
aggtccgtgaacact

SEQ ID NO: 4216 - DNA, 15 bp, synthetic construct
  source 1..15: mol_type = other DNA
tgcgtaggctctgcc

SEQ ID NO: 4217 - DNA, 15 bp, synthetic construct
  source 1..15: mol_type = other DNA
ccgactcatcgttgt

SEQ ID NO: 4218 - DNA, 15 bp, synthetic construct
  source 1..15: mol_type = other DNA
tggtttccggacctg

SEQ ID NO: 4219 - DNA, 15 bp, synthetic construct
  source 1..15: mol_type = other DNA
gatggcagccgcgaa

SEQ ID NO: 4220 - DNA, 15 bp, synthetic construct
  source 1..15: mol_type = other DNA
ggcatcttggagact

SEQ ID NO: 4221 - DNA, 15 bp, synthetic construct
  source 1..15: mol_type = other DNA
catgttccggaggac

SEQ ID NO: 4222 - DNA, 15 bp, synthetic construct
  source 1..15: mol_type = other DNA
gaggtcttcagcgtg

SEQ ID NO: 4223 - DNA, 15 bp, synthetic construct
  source 1..15: mol_type = other DNA
taggtctgcatggtc

SEQ ID NO: 4224 - DNA, 15 bp, synthetic construct
  source 1..15: mol_type = other DNA
caccatcgtgtccac

SEQ ID NO: 4225 - DNA, 15 bp, synthetic construct
  source 1..15: mol_type = other DNA
ttactatgcatcaac

SEQ ID NO: 4226 - DNA, 15 bp, synthetic construct
  source 1..15: mol_type = other DNA
cggcccattctctgc

SEQ ID NO: 4227 - DNA, 15 bp, synthetic construct
  source 1..15: mol_type = other DNA
tttctcgttccttca

SEQ ID NO: 4228 - DNA, 15 bp, synthetic construct
  source 1..15: mol_type = other DNA
cacttcattctgttt

SEQ ID NO: 4229 - DNA, 15 bp, synthetic construct
  source 1..15: mol_type = other DNA
cgcaaaagatgttca

SEQ ID NO: 4230 - DNA, 15 bp, synthetic construct
  source 1..15: mol_type = other DNA
tgtgtgagctcacgg

SEQ ID NO: 4231 - DNA, 15 bp, synthetic construct
  source 1..15: mol_type = other DNA
catgatgcaggtgag

SEQ ID NO: 4232 - DNA, 15 bp, synthetic construct
  source 1..15: mol_type = other DNA
ccaggatatcctggg

SEQ ID NO: 4233 - DNA, 15 bp, synthetic construct
  source 1..15: mol_type = other DNA
gtaatctccactgtc

SEQ ID NO: 4234 - DNA, 15 bp, synthetic construct
  source 1..15: mol_type = other DNA
tacaaccctgtgtgg

SEQ ID NO: 4235 - DNA, 15 bp, synthetic construct
  source 1..15: mol_type = other DNA
agtccagaatggatg

SEQ ID NO: 4236 - DNA, 15 bp, synthetic construct
  source 1..15: mol_type = other DNA
ctgccttcaagctca

SEQ ID NO: 4237 - DNA, 15 bp, synthetic construct
  source 1..15: mol_type = other DNA
ggttgacagcttcca

SEQ ID NO: 4238 - DNA, 15 bp, synthetic construct
  source 1..15: mol_type = other DNA
ccctccacggtactc

SEQ ID NO: 4239 - DNA, 15 bp, synthetic construct
  source 1..15: mol_type = other DNA
catcggagctctctt

SEQ ID NO: 4240 - DNA, 15 bp, synthetic construct
  source 1..15: mol_type = other DNA
ctttaatttgcttcg

SEQ ID NO: 4241 - DNA, 15 bp, synthetic construct
  source 1..15: mol_type = other DNA
agttgctggaatgcg

SEQ ID NO: 4242 - DNA, 15 bp, synthetic construct
  source 1..15: mol_type = other DNA
gatgatgtttgagac

SEQ ID NO: 4243 - DNA, 15 bp, synthetic construct
  source 1..15: mol_type = other DNA
caaaaaggccgctgt

SEQ ID NO: 4244 - DNA, 15 bp, synthetic construct
  source 1..15: mol_type = other DNA
gtaatgaaagctggc

SEQ ID NO: 4245 - DNA, 15 bp, synthetic construct
  source 1..15: mol_type = other DNA
agcgaatttcatacc

SEQ ID NO: 4246 - DNA, 15 bp, synthetic construct
  source 1..15: mol_type = other DNA
aagtgagatgatcac

SEQ ID NO: 4247 - DNA, 15 bp, synthetic construct
  source 1..15: mol_type = other DNA
cccaaagcatctcag

SEQ ID NO: 4248 - DNA, 15 bp, synthetic construct
  source 1..15: mol_type = other DNA
acaccaatttgatgg

SEQ ID NO: 4249 - DNA, 15 bp, synthetic construct
  source 1..15: mol_type = other DNA
ctaagaccaggaacg

SEQ ID NO: 4250 - DNA, 15 bp, synthetic construct
  source 1..15: mol_type = other DNA
tcacaagaagttcgg

SEQ ID NO: 4251 - DNA, 15 bp, synthetic construct
  source 1..15: mol_type = other DNA
taatgggctcaaaaa

SEQ ID NO: 4252 - DNA, 15 bp, synthetic construct
  source 1..15: mol_type = other DNA
ccacacatggagtaa

SEQ ID NO: 4253 - DNA, 15 bp, synthetic construct
  source 1..15: mol_type = other DNA
taatggccactgtct

SEQ ID NO: 4254 - DNA, 15 bp, synthetic construct
  source 1..15: mol_type = other DNA
gaagcggcgtgcctt

SEQ ID NO: 4255 - DNA, 15 bp, synthetic construct
  source 1..15: mol_type = other DNA
ccagaacctagcaca

SEQ ID NO: 4256 - DNA, 15 bp, synthetic construct
  source 1..15: mol_type = other DNA
gacgttgatggatga

SEQ ID NO: 4257 - DNA, 15 bp, synthetic construct
  source 1..15: mol_type = other DNA
ccagaaaagccacgt

SEQ ID NO: 4258 - DNA, 15 bp, synthetic construct
  source 1..15: mol_type = other DNA
ttcgagtcccgcatg

SEQ ID NO: 4259 - DNA, 15 bp, synthetic construct
  source 1..15: mol_type = other DNA
cagctctgacacata

SEQ ID NO: 4260 - DNA, 15 bp, synthetic construct
  source 1..15: mol_type = other DNA
ctcgttcatgggcag

SEQ ID NO: 4261 - DNA, 15 bp, synthetic construct
  source 1..15: mol_type = other DNA
tctctcgagaagcag

SEQ ID NO: 4262 - DNA, 15 bp, synthetic construct
  source 1..15: mol_type = other DNA
gcttgcttctcactg

SEQ ID NO: 4263 - DNA, 15 bp, synthetic construct
  source 1..15: mol_type = other DNA
cgttcctagccgcca

SEQ ID NO: 4264 - DNA, 15 bp, synthetic construct
  source 1..15: mol_type = other DNA
ttcacactctccgtc

SEQ ID NO: 4265 - DNA, 15 bp, synthetic construct
  source 1..15: mol_type = other DNA
gcctgagaatggctc

SEQ ID NO: 4266 - DNA, 15 bp, synthetic construct
  source 1..15: mol_type = other DNA
ggaatggtgatctca

SEQ ID NO: 4267 - DNA, 15 bp, synthetic construct
  source 1..15: mol_type = other DNA
gggcgatttcgccag

SEQ ID NO: 4268 - DNA, 15 bp, synthetic construct
  source 1..15: mol_type = other DNA
caaagttgctcggca

SEQ ID NO: 4269 - DNA, 15 bp, synthetic construct
  source 1..15: mol_type = other DNA
ttaaaggcaaaaagg

SEQ ID NO: 4270 - DNA, 15 bp, synthetic construct
  source 1..15: mol_type = other DNA
atgagggtgatgttc

SEQ ID NO: 4271 - DNA, 15 bp, synthetic construct
  source 1..15: mol_type = other DNA
gggccatgtagttgg

SEQ ID NO: 4272 - DNA, 15 bp, synthetic construct
  source 1..15: mol_type = other DNA
gatggtgagcaccac

SEQ ID NO: 4273 - DNA, 15 bp, synthetic construct
  source 1..15: mol_type = other DNA
acagagcgatcctgg

SEQ ID NO: 4274 - DNA, 15 bp, synthetic construct
  source 1..15: mol_type = other DNA
gagaacccactctcc

SEQ ID NO: 4275 - DNA, 15 bp, synthetic construct
  source 1..15: mol_type = other DNA
cacggcagtatagag

SEQ ID NO: 4276 - DNA, 15 bp, synthetic construct
  source 1..15: mol_type = other DNA
agtaggcatcagaat

SEQ ID NO: 4277 - DNA, 15 bp, synthetic construct
  source 1..15: mol_type = other DNA
gtgatgatatagatg

SEQ ID NO: 4278 - DNA, 15 bp, synthetic construct
  source 1..15: mol_type = other DNA
gcagacgcagtgtgc

SEQ ID NO: 4279 - DNA, 15 bp, synthetic construct
  source 1..15: mol_type = other DNA
tggccgtcagagctc

SEQ ID NO: 4280 - DNA, 15 bp, synthetic construct
  source 1..15: mol_type = other DNA
atgctccacctctcg

SEQ ID NO: 4281 - DNA, 15 bp, synthetic construct
  source 1..15: mol_type = other DNA
gcggagtgaagagtc

SEQ ID NO: 4282 - DNA, 15 bp, synthetic construct
  source 1..15: mol_type = other DNA
tggaattccaccaaa

SEQ ID NO: 4283 - DNA, 15 bp, synthetic construct
  source 1..15: mol_type = other DNA
ggaggaaacaagggt

SEQ ID NO: 4284 - DNA, 15 bp, synthetic construct
  source 1..15: mol_type = other DNA
ctaaagaggcggtca

SEQ ID NO: 4285 - DNA, 15 bp, synthetic construct
  source 1..15: mol_type = other DNA
ccttgaacactcaaa

SEQ ID NO: 4286 - DNA, 15 bp, synthetic construct
  source 1..15: mol_type = other DNA
ctaggccaccatgaa

SEQ ID NO: 4287 - DNA, 15 bp, synthetic construct
  source 1..15: mol_type = other DNA
gtccaggctatttgc

SEQ ID NO: 4288 - DNA, 15 bp, synthetic construct
  source 1..15: mol_type = other DNA
tggcgagtctcacag

SEQ ID NO: 4289 - DNA, 15 bp, synthetic construct
  source 1..15: mol_type = other DNA
tggcttgggtttcct

SEQ ID NO: 4290 - DNA, 15 bp, synthetic construct
  source 1..15: mol_type = other DNA
tcaactgttgcccgc

SEQ ID NO: 4291 - DNA, 15 bp, synthetic construct
  source 1..15: mol_type = other DNA
ctaagttctcctggg

SEQ ID NO: 4292 - DNA, 15 bp, synthetic construct
  source 1..15: mol_type = other DNA
catcacaggcgttgg

SEQ ID NO: 4293 - DNA, 15 bp, synthetic construct
  source 1..15: mol_type = other DNA
acaggcatctttata

SEQ ID NO: 4294 - DNA, 15 bp, synthetic construct
  source 1..15: mol_type = other DNA
catatcccagaaaat

SEQ ID NO: 4295 - DNA, 15 bp, synthetic construct
  source 1..15: mol_type = other DNA
cctgacaataagtgt

SEQ ID NO: 4296 - DNA, 15 bp, synthetic construct
  source 1..15: mol_type = other DNA
tgcatacagacgaga

SEQ ID NO: 4297 - DNA, 15 bp, synthetic construct
  source 1..15: mol_type = other DNA
tgccattgtagggac

SEQ ID NO: 4298 - DNA, 15 bp, synthetic construct
  source 1..15: mol_type = other DNA
aggtgagaaggaaca

SEQ ID NO: 4299 - DNA, 15 bp, synthetic construct
  source 1..15: mol_type = other DNA
tctgccaaccttcaa

SEQ ID NO: 4300 - DNA, 15 bp, synthetic construct
  source 1..15: mol_type = other DNA
tcaagttcaagtctt

SEQ ID NO: 4301 - DNA, 15 bp, synthetic construct
  source 1..15: mol_type = other DNA
actaattgggtcggg

SEQ ID NO: 4302 - DNA, 15 bp, synthetic construct
  source 1..15: mol_type = other DNA
ttgaaggctgacttg

SEQ ID NO: 4303 - DNA, 15 bp, synthetic construct
  source 1..15: mol_type = other DNA
tattatctcaaagcc

SEQ ID NO: 4304 - DNA, 15 bp, synthetic construct
  source 1..15: mol_type = other DNA
ctttgttcttgcgcg

SEQ ID NO: 4305 - DNA, 15 bp, synthetic construct
  source 1..15: mol_type = other DNA
ccaactatgattcca

SEQ ID NO: 4306 - DNA, 15 bp, synthetic construct
  source 1..15: mol_type = other DNA
cctcgccgatacggt

SEQ ID NO: 4307 - DNA, 15 bp, synthetic construct
  source 1..15: mol_type = other DNA
acgtttcacacacac

SEQ ID NO: 4308 - DNA, 15 bp, synthetic construct
  source 1..15: mol_type = other DNA
ccaactcctgttcag

SEQ ID NO: 4309 - DNA, 15 bp, synthetic construct
  source 1..15: mol_type = other DNA
agcggtcttcgctgg

SEQ ID NO: 4310 - DNA, 15 bp, synthetic construct
  source 1..15: mol_type = other DNA
gacatcctgacacat

SEQ ID NO: 4311 - DNA, 15 bp, synthetic construct
  source 1..15: mol_type = other DNA
gcgccaaaacgatga

SEQ ID NO: 4312 - DNA, 15 bp, synthetic construct
  source 1..15: mol_type = other DNA
tgctcaacaacagga

SEQ ID NO: 4313 - DNA, 15 bp, synthetic construct
  source 1..15: mol_type = other DNA
ttttcgcataaccac

SEQ ID NO: 4314 - DNA, 15 bp, synthetic construct
  source 1..15: mol_type = other DNA
gaatctgaggccgag

SEQ ID NO: 4315 - DNA, 15 bp, synthetic construct
  source 1..15: mol_type = other DNA
tcacacaggatttct

SEQ ID NO: 4316 - DNA, 15 bp, synthetic construct
  source 1..15: mol_type = other DNA
attgcacaaccgcca

SEQ ID NO: 4317 - DNA, 15 bp, synthetic construct
  source 1..15: mol_type = other DNA
caccattaagcatcc

SEQ ID NO: 4318 - DNA, 15 bp, synthetic construct
  source 1..15: mol_type = other DNA
gaccaagaaacccac

SEQ ID NO: 4319 - DNA, 15 bp, synthetic construct
  source 1..15: mol_type = other DNA
gggtggactgttatt

SEQ ID NO: 4320 - DNA, 15 bp, synthetic construct
  source 1..15: mol_type = other DNA
cgaatgcctgttaca

SEQ ID NO: 4321 - DNA, 15 bp, synthetic construct
  source 1..15: mol_type = other DNA
ggatgtcttctattt

SEQ ID NO: 4322 - DNA, 15 bp, synthetic construct
  source 1..15: mol_type = other DNA
gaatgggctgtgctt

SEQ ID NO: 4323 - DNA, 15 bp, synthetic construct
  source 1..15: mol_type = other DNA
actttccgagcggag

SEQ ID NO: 4324 - DNA, 15 bp, synthetic construct
  source 1..15: mol_type = other DNA
gtagtctcagtgtca

SEQ ID NO: 4325 - DNA, 15 bp, synthetic construct
  source 1..15: mol_type = other DNA
agagaagtgccaggc

SEQ ID NO: 4326 - DNA, 15 bp, synthetic construct
  source 1..15: mol_type = other DNA
tgttataaaactggc

SEQ ID NO: 4327 - DNA, 15 bp, synthetic construct
  source 1..15: mol_type = other DNA
aggatgttacccagc

SEQ ID NO: 4328 - DNA, 15 bp, synthetic construct
  source 1..15: mol_type = other DNA
gatcgattcgcaacg

SEQ ID NO: 4329 - DNA, 15 bp, synthetic construct
  source 1..15: mol_type = other DNA
gatccttcattcaca

SEQ ID NO: 4330 - DNA, 15 bp, synthetic construct
  source 1..15: mol_type = other DNA
ggacacttgaacttc

SEQ ID NO: 4331 - DNA, 15 bp, synthetic construct
  source 1..15: mol_type = other DNA
gatgttgtaaaacag

SEQ ID NO: 4332 - DNA, 15 bp, synthetic construct
  source 1..15: mol_type = other DNA
aacatttggccgcaa

SEQ ID NO: 4333 - DNA, 15 bp, synthetic construct
  source 1..15: mol_type = other DNA
atcggaaggataaaa

SEQ ID NO: 4334 - DNA, 15 bp, synthetic construct
  source 1..15: mol_type = other DNA
gtccttctgaattat

SEQ ID NO: 4335 - DNA, 15 bp, synthetic construct
  source 1..15: mol_type = other DNA
tgcaccgtccagtcc

SEQ ID NO: 4336 - DNA, 15 bp, synthetic construct
  source 1..15: mol_type = other DNA
ttggtagattctgag

SEQ ID NO: 4337 - DNA, 15 bp, synthetic construct
  source 1..15: mol_type = other DNA
attgctctggtcact

SEQ ID NO: 4338 - DNA, 15 bp, synthetic construct
  source 1..15: mol_type = other DNA
cctgttccttgctag

SEQ ID NO: 4339 - DNA, 15 bp, synthetic construct
  source 1..15: mol_type = other DNA
cgttgagaaacccgc

SEQ ID NO: 4340 - DNA, 15 bp, synthetic construct
  source 1..15: mol_type = other DNA
tggtccagatgtgtg

SEQ ID NO: 4341 - DNA, 15 bp, synthetic construct
  source 1..15: mol_type = other DNA
cctttcttccatggg

SEQ ID NO: 4342 - DNA, 15 bp, synthetic construct
  source 1..15: mol_type = other DNA
catctggtgctgagg

SEQ ID NO: 4343 - DNA, 15 bp, synthetic construct
  source 1..15: mol_type = other DNA
aggcttgaacctgca

SEQ ID NO: 4344 - DNA, 15 bp, synthetic construct
  source 1..15: mol_type = other DNA
gttttctctttgttg

SEQ ID NO: 4345 - DNA, 15 bp, synthetic construct
  source 1..15: mol_type = other DNA
tttcttgaccacttt

SEQ ID NO: 4346 - DNA, 15 bp, synthetic construct
  source 1..15: mol_type = other DNA
gaagtggtactgctg

SEQ ID NO: 4347 - DNA, 15 bp, synthetic construct
  source 1..15: mol_type = other DNA
atagcgactcgttaa

SEQ ID NO: 4348 - DNA, 15 bp, synthetic construct
  source 1..15: mol_type = other DNA
gcacagttagttctg

SEQ ID NO: 4349 - DNA, 15 bp, synthetic construct
  source 1..15: mol_type = other DNA
gtacacagccttgtt

SEQ ID NO: 4350 - DNA, 15 bp, synthetic construct
  source 1..15: mol_type = other DNA
gtcatagatccggac

SEQ ID NO: 4351 - DNA, 15 bp, synthetic construct
  source 1..15: mol_type = other DNA
tgcaacacactggta

SEQ ID NO: 4352 - DNA, 15 bp, synthetic construct
  source 1..15: mol_type = other DNA
ttgacttcgtagccc

SEQ ID NO: 4353 - DNA, 15 bp, synthetic construct
  source 1..15: mol_type = other DNA
cttcttctaagaaag

SEQ ID NO: 4354 - DNA, 15 bp, synthetic construct
  source 1..15: mol_type = other DNA
acaagtccggcactt

SEQ ID NO: 4355 - DNA, 15 bp, synthetic construct
  source 1..15: mol_type = other DNA
catctggttcaatgc

SEQ ID NO: 4356 - DNA, 15 bp, synthetic construct
  source 1..15: mol_type = other DNA
accataatgacagcc

SEQ ID NO: 4357 - DNA, 15 bp, synthetic construct
  source 1..15: mol_type = other DNA
gtaaggcataatgaa

SEQ ID NO: 4358 - DNA, 15 bp, synthetic construct
  source 1..15: mol_type = other DNA
actgtatgtcttgac

SEQ ID NO: 4359 - DNA, 15 bp, synthetic construct
  source 1..15: mol_type = other DNA
actctgactttattg

SEQ ID NO: 4360 - DNA, 15 bp, synthetic construct
  source 1..15: mol_type = other DNA
accaaacaccattaa

SEQ ID NO: 4361 - DNA, 15 bp, synthetic construct
  source 1..15: mol_type = other DNA
ctgtgagctcgacac

SEQ ID NO: 4362 - DNA, 15 bp, synthetic construct
  source 1..15: mol_type = other DNA
gaactgtggctgtcg

SEQ ID NO: 4363 - DNA, 15 bp, synthetic construct
  source 1..15: mol_type = other DNA
ccttgatgagctctc

SEQ ID NO: 4364 - DNA, 15 bp, synthetic construct
  source 1..15: mol_type = other DNA
gggcagttttttctg

SEQ ID NO: 4365 - DNA, 15 bp, synthetic construct
  source 1..15: mol_type = other DNA
aatacagcatctgcc

SEQ ID NO: 4366 - DNA, 15 bp, synthetic construct
  source 1..15: mol_type = other DNA
agaagaccttacagc

SEQ ID NO: 4367 - DNA, 15 bp, synthetic construct
  source 1..15: mol_type = other DNA
tgtccaagacactgt

SEQ ID NO: 4368 - DNA, 15 bp, synthetic construct
  source 1..15: mol_type = other DNA
cccgattagtgacag

SEQ ID NO: 4369 - DNA, 15 bp, synthetic construct
  source 1..15: mol_type = other DNA
cctttatctcccgac

SEQ ID NO: 4370 - DNA, 15 bp, synthetic construct
  source 1..15: mol_type = other DNA
gaagttgcctctcgc

SEQ ID NO: 4371 - DNA, 15 bp, synthetic construct
  source 1..15: mol_type = other DNA
cacgtccgacagcga

SEQ ID NO: 4372 - DNA, 15 bp, synthetic construct
  source 1..15: mol_type = other DNA
ctgtattgtgggctc

SEQ ID NO: 4373 - DNA, 15 bp, synthetic construct
  source 1..15: mol_type = other DNA
ccaacttctgtccga

SEQ ID NO: 4374 - DNA, 15 bp, synthetic construct
  source 1..15: mol_type = other DNA
gtacagcccattccc

SEQ ID NO: 4375 - DNA, 15 bp, synthetic construct
  source 1..15: mol_type = other DNA
gaacgcccactggct

SEQ ID NO: 4376 - DNA, 15 bp, synthetic construct
  source 1..15: mol_type = other DNA
taggcctcattccag

SEQ ID NO: 4377 - DNA, 15 bp, synthetic construct
  source 1..15: mol_type = other DNA
ctgttttcttctact

SEQ ID NO: 4378 - DNA, 15 bp, synthetic construct
  source 1..15: mol_type = other DNA
gagatcttgcaccgg

SEQ ID NO: 4379 - DNA, 15 bp, synthetic construct
  source 1..15: mol_type = other DNA
cctgatgatctcttc

SEQ ID NO: 4380 - DNA, 15 bp, synthetic construct
  source 1..15: mol_type = other DNA
catacagcaggatcc

SEQ ID NO: 4381 - DNA, 15 bp, synthetic construct
  source 1..15: mol_type = other DNA
acaaaacccaggcag

SEQ ID NO: 4382 - DNA, 15 bp, synthetic construct
  source 1..15: mol_type = other DNA
gcggatgcctgagta

SEQ ID NO: 4383 - DNA, 15 bp, synthetic construct
  source 1..15: mol_type = other DNA
acagttccatggcag

SEQ ID NO: 4384 - DNA, 15 bp, synthetic construct
  source 1..15: mol_type = other DNA
ctcggagttttacta

SEQ ID NO: 4385 - DNA, 15 bp, synthetic construct
  source 1..15: mol_type = other DNA
ccctgtagcctcttc

SEQ ID NO: 4386 - DNA, 15 bp, synthetic construct
  source 1..15: mol_type = other DNA
gttgattttggacaa

SEQ ID NO: 4387 - DNA, 15 bp, synthetic construct
  source 1..15: mol_type = other DNA
gagaaacccgagctc

SEQ ID NO: 4388 - DNA, 15 bp, synthetic construct
  source 1..15: mol_type = other DNA
agaactgcttttcat

SEQ ID NO: 4389 - DNA, 15 bp, synthetic construct
  source 1..15: mol_type = other DNA
ttctccacgtgtttg

SEQ ID NO: 4390 - DNA, 15 bp, synthetic construct
  source 1..15: mol_type = other DNA
actgtcgggcctctc

SEQ ID NO: 4391 - DNA, 15 bp, synthetic construct
  source 1..15: mol_type = other DNA
cgataaggatgtttt

SEQ ID NO: 4392 - DNA, 15 bp, synthetic construct
  source 1..15: mol_type = other DNA
catttacagcttttc

SEQ ID NO: 4393 - DNA, 15 bp, synthetic construct
  source 1..15: mol_type = other DNA
aggtcttggctttga

SEQ ID NO: 4394 - DNA, 15 bp, synthetic construct
  source 1..15: mol_type = other DNA
ggacttaaaatggtg

SEQ ID NO: 4395 - DNA, 15 bp, synthetic construct
  source 1..15: mol_type = other DNA
agcaatgctggacac

SEQ ID NO: 4396 - DNA, 15 bp, synthetic construct
  source 1..15: mol_type = other DNA
atgcgcatctttcaa

SEQ ID NO: 4397 - DNA, 15 bp, synthetic construct
  source 1..15: mol_type = other DNA
aatgagatgctgaca

SEQ ID NO: 4398 - DNA, 15 bp, synthetic construct
  source 1..15: mol_type = other DNA
agcagctatggaagc

SEQ ID NO: 4399 - DNA, 15 bp, synthetic construct
  source 1..15: mol_type = other DNA
cgagacgtgtcactg

SEQ ID NO: 4400 - DNA, 15 bp, synthetic construct
  source 1..15: mol_type = other DNA
ttggcctatctgatg

SEQ ID NO: 4401 - DNA, 15 bp, synthetic construct
  source 1..15: mol_type = other DNA
gtatctatgggagga

SEQ ID NO: 4402 - DNA, 15 bp, synthetic construct
  source 1..15: mol_type = other DNA
cattgcacacagagg

SEQ ID NO: 4403 - DNA, 15 bp, synthetic construct
  source 1..15: mol_type = other DNA
taacgcccttcaggg

SEQ ID NO: 4404 - DNA, 15 bp, synthetic construct
  source 1..15: mol_type = other DNA
ctgagagtgaagccc

SEQ ID NO: 4405 - DNA, 15 bp, synthetic construct
  source 1..15: mol_type = other DNA
gaccttcagagtggt

SEQ ID NO: 4406 - DNA, 15 bp, synthetic construct
  source 1..15: mol_type = other DNA
catgtaaggcaggtg

SEQ ID NO: 4407 - DNA, 15 bp, synthetic construct
  source 1..15: mol_type = other DNA
gttcagtgctaagaa

SEQ ID NO: 4408 - DNA, 15 bp, synthetic construct
  source 1..15: mol_type = other DNA
gagcgagtgggattt

SEQ ID NO: 4409 - DNA, 15 bp, synthetic construct
  source 1..15: mol_type = other DNA
gaggatgttcatcag

SEQ ID NO: 4410 - DNA, 15 bp, synthetic construct
  source 1..15: mol_type = other DNA
cggtgtatcgagaga

SEQ ID NO: 4411 - DNA, 15 bp, synthetic construct
  source 1..15: mol_type = other DNA
atccgcagaggcaga

SEQ ID NO: 4412 - DNA, 15 bp, synthetic construct
  source 1..15: mol_type = other DNA
ccggaattcgctctc

SEQ ID NO: 4413 - DNA, 15 bp, synthetic construct
  source 1..15: mol_type = other DNA
aaatgtggctgtgag

SEQ ID NO: 4414 - DNA, 15 bp, synthetic construct
  source 1..15: mol_type = other DNA
cgctgatgctgtttc

SEQ ID NO: 4415 - DNA, 15 bp, synthetic construct
  source 1..15: mol_type = other DNA
tggcaacgctcgcct

SEQ ID NO: 4416 - DNA, 15 bp, synthetic construct
  source 1..15: mol_type = other DNA
ttagagaaacccgcc

SEQ ID NO: 4417 - DNA, 15 bp, synthetic construct
  source 1..15: mol_type = other DNA
aatgcgtgcggccca

SEQ ID NO: 4418 - DNA, 15 bp, synthetic construct
  source 1..15: mol_type = other DNA
ggcagcaaattccgc

SEQ ID NO: 4419 - DNA, 15 bp, synthetic construct
  source 1..15: mol_type = other DNA
tgactatgcaggtga

SEQ ID NO: 4420 - DNA, 15 bp, synthetic construct
  source 1..15: mol_type = other DNA
cacagcttgtgtaaa

SEQ ID NO: 4421 - DNA, 15 bp, synthetic construct
  source 1..15: mol_type = other DNA
tggccacaagtttgg

SEQ ID NO: 4422 - DNA, 15 bp, synthetic construct
  source 1..15: mol_type = other DNA
gccatcctcgctcct

SEQ ID NO: 4423 - DNA, 15 bp, synthetic construct
  source 1..15: mol_type = other DNA
ttcaaagtagcctgc

SEQ ID NO: 4424 - DNA, 15 bp, synthetic construct
  source 1..15: mol_type = other DNA
gaaagtgacactagt

SEQ ID NO: 4425 - DNA, 15 bp, synthetic construct
  source 1..15: mol_type = other DNA
cgtggtggttttcaa

SEQ ID NO: 4426 - DNA, 15 bp, synthetic construct
  source 1..15: mol_type = other DNA
ttgaactgcttgaaa

SEQ ID NO: 4427 - DNA, 15 bp, synthetic construct
  source 1..15: mol_type = other DNA
tctttgcgagataac

SEQ ID NO: 4428 - DNA, 15 bp, synthetic construct
  source 1..15: mol_type = other DNA
tagtagtctgggttg

SEQ ID NO: 4429 - DNA, 15 bp, synthetic construct
  source 1..15: mol_type = other DNA
atatcagtgagatca

SEQ ID NO: 4430 - DNA, 15 bp, synthetic construct
  source 1..15: mol_type = other DNA
cgctcgtacacatcc

SEQ ID NO: 4431 - DNA, 15 bp, synthetic construct
  source 1..15: mol_type = other DNA
gttcaggacgagctg

SEQ ID NO: 4432 - DNA, 15 bp, synthetic construct
  source 1..15: mol_type = other DNA
caagcagccagtcga

SEQ ID NO: 4433 - DNA, 15 bp, synthetic construct
  source 1..15: mol_type = other DNA
gtagaccatgggaga

SEQ ID NO: 4434 - DNA, 15 bp, synthetic construct
  source 1..15: mol_type = other DNA
gtattcaaggtcatc

SEQ ID NO: 4435 - DNA, 15 bp, synthetic construct
  source 1..15: mol_type = other DNA
tttcagctcccaaaa

SEQ ID NO: 4436 - DNA, 15 bp, synthetic construct
  source 1..15: mol_type = other DNA
acgaccatagacttg

SEQ ID NO: 4437 - DNA, 15 bp, synthetic construct
  source 1..15: mol_type = other DNA
agaatcagcaatgga

SEQ ID NO: 4438 - DNA, 15 bp, synthetic construct
  source 1..15: mol_type = other DNA
atgatgtacttggcg

SEQ ID NO: 4439 - DNA, 15 bp, synthetic construct
  source 1..15: mol_type = other DNA
tttttgcccttgcaa

SEQ ID NO: 4440 - DNA, 15 bp, synthetic construct
  source 1..15: mol_type = other DNA
gcacagtcgcgtcgt

SEQ ID NO: 4441 - DNA, 15 bp, synthetic construct
  source 1..15: mol_type = other DNA
tcacgatgtcagcca

SEQ ID NO: 4442 - DNA, 15 bp, synthetic construct
  source 1..15: mol_type = other DNA
ggcagaggttacggc

SEQ ID NO: 4443 - DNA, 15 bp, synthetic construct
  source 1..15: mol_type = other DNA
ttgtacggagttgtc

SEQ ID NO: 4444 - DNA, 15 bp, synthetic construct
  source 1..15: mol_type = other DNA
gcacgtccttcacca

SEQ ID NO: 4445 - DNA, 15 bp, synthetic construct
  source 1..15: mol_type = other DNA
tgcgaatacggagca

SEQ ID NO: 4446 - DNA, 15 bp, synthetic construct
  source 1..15: mol_type = other DNA
gattttctgagcatt

SEQ ID NO: 4447 - DNA, 15 bp, synthetic construct
  source 1..15: mol_type = other DNA
atcatccatcttgtc

SEQ ID NO: 4448 - DNA, 15 bp, synthetic construct
  source 1..15: mol_type = other DNA
cccacgtgaaacaca

SEQ ID NO: 4449 - DNA, 15 bp, synthetic construct
  source 1..15: mol_type = other DNA
cagaacgccggatcc

SEQ ID NO: 4450 - DNA, 15 bp, synthetic construct
  source 1..15: mol_type = other DNA
atccgcttgccctcg

SEQ ID NO: 4451 - DNA, 15 bp, synthetic construct
  source 1..15: mol_type = other DNA
gcttcagggacttga

SEQ ID NO: 4452 - DNA, 15 bp, synthetic construct
  source 1..15: mol_type = other DNA
ggtatttgatgccac

SEQ ID NO: 4453 - DNA, 15 bp, synthetic construct
  source 1..15: mol_type = other DNA
atctctaggtaggag

SEQ ID NO: 4454 - DNA, 15 bp, synthetic construct
  source 1..15: mol_type = other DNA
caggaacatcaggag

SEQ ID NO: 4455 - DNA, 15 bp, synthetic construct
  source 1..15: mol_type = other DNA
gttgtatgctccaga

SEQ ID NO: 4456 - DNA, 15 bp, synthetic construct
  source 1..15: mol_type = other DNA
cacaatttccctcat

SEQ ID NO: 4457 - DNA, 15 bp, synthetic construct
  source 1..15: mol_type = other DNA
gtggaagtttctcaa

SEQ ID NO: 4458 - DNA, 15 bp, synthetic construct
  source 1..15: mol_type = other DNA
gtaagcacacggtca

SEQ ID NO: 4459 - DNA, 15 bp, synthetic construct
  source 1..15: mol_type = other DNA
agtatttgcccgttg

SEQ ID NO: 4460 - DNA, 15 bp, synthetic construct
  source 1..15: mol_type = other DNA
cacctccagtagaaa

SEQ ID NO: 4461 - DNA, 15 bp, synthetic construct
  source 1..15: mol_type = other DNA
tcccataatagactc

SEQ ID NO: 4462 - DNA, 15 bp, synthetic construct
  source 1..15: mol_type = other DNA
tgaagactgccttca

SEQ ID NO: 4463 - DNA, 15 bp, synthetic construct
  source 1..15: mol_type = other DNA
aggatccctttccct

SEQ ID NO: 4464 - DNA, 15 bp, synthetic construct
  source 1..15: mol_type = other DNA
attctccatctggcc

SEQ ID NO: 4465 - DNA, 15 bp, synthetic construct
  source 1..15: mol_type = other DNA
aggcgtcagaatagc

SEQ ID NO: 4466 - DNA, 15 bp, synthetic construct
  source 1..15: mol_type = other DNA
catataaccagggca

SEQ ID NO: 4467 - DNA, 15 bp, synthetic construct
  source 1..15: mol_type = other DNA
caacttggctctcac

SEQ ID NO: 4468 - DNA, 15 bp, synthetic construct
  source 1..15: mol_type = other DNA
acctctacggatatc

SEQ ID NO: 4469 - DNA, 15 bp, synthetic construct
  source 1..15: mol_type = other DNA
tccaggttgtgtcag

SEQ ID NO: 4470 - DNA, 15 bp, synthetic construct
  source 1..15: mol_type = other DNA
aaactcctggtgtca

SEQ ID NO: 4471 - DNA, 15 bp, synthetic construct
  source 1..15: mol_type = other DNA
ttggtgaccttggtg

SEQ ID NO: 4472 - DNA, 15 bp, synthetic construct
  source 1..15: mol_type = other DNA
ctccaatatgtccga

SEQ ID NO: 4473 - DNA, 15 bp, synthetic construct
  source 1..15: mol_type = other DNA
ttccaacaggtgtgt

SEQ ID NO: 4474 - DNA, 15 bp, synthetic construct
  source 1..15: mol_type = other DNA
gatttctttgaaggt

SEQ ID NO: 4475 - DNA, 15 bp, synthetic construct
  source 1..15: mol_type = other DNA
cagttattgtttcac

SEQ ID NO: 4476 - DNA, 15 bp, synthetic construct
  source 1..15: mol_type = other DNA
gttgaagggcacaga

SEQ ID NO: 4477 - DNA, 15 bp, synthetic construct
  source 1..15: mol_type = other DNA
tgtgaatcgcaccgt

SEQ ID NO: 4478 - DNA, 15 bp, synthetic construct
  source 1..15: mol_type = other DNA
ttgagtctctccgtt

SEQ ID NO: 4479 - DNA, 15 bp, synthetic construct
  source 1..15: mol_type = other DNA
ttgcaacttcctcac

SEQ ID NO: 4480 - DNA, 15 bp, synthetic construct
  source 1..15: mol_type = other DNA
ggtttgatgggtgtg

SEQ ID NO: 4481 - DNA, 15 bp, synthetic construct
  source 1..15: mol_type = other DNA
ttcccatcgccagcc

SEQ ID NO: 4482 - DNA, 15 bp, synthetic construct
  source 1..15: mol_type = other DNA
gctggtccgtttctt

SEQ ID NO: 4483 - DNA, 15 bp, synthetic construct
  source 1..15: mol_type = other DNA
gcaacatgcccaggg

SEQ ID NO: 4484 - DNA, 15 bp, synthetic construct
  source 1..15: mol_type = other DNA
tttttgagctctggg

SEQ ID NO: 4485 - DNA, 15 bp, synthetic construct
  source 1..15: mol_type = other DNA
ttgagatgcagtggg

SEQ ID NO: 4486 - DNA, 15 bp, synthetic construct
  source 1..15: mol_type = other DNA
gggtctgacggagag

SEQ ID NO: 4487 - DNA, 15 bp, synthetic construct
  source 1..15: mol_type = other DNA
gtgaagctggctaaa

SEQ ID NO: 4488 - DNA, 15 bp, synthetic construct
  source 1..15: mol_type = other DNA
catcatggcaggtcc

SEQ ID NO: 4489 - DNA, 15 bp, synthetic construct
  source 1..15: mol_type = other DNA
catccgtggaatcgg

SEQ ID NO: 4490 - DNA, 15 bp, synthetic construct
  source 1..15: mol_type = other DNA
gattcccttccttcc

SEQ ID NO: 4491 - DNA, 15 bp, synthetic construct
  source 1..15: mol_type = other DNA
tcaaggctttggtgg

SEQ ID NO: 4492 - DNA, 15 bp, synthetic construct
  source 1..15: mol_type = other DNA
aggccatttcgatca

SEQ ID NO: 4493 - DNA, 15 bp, synthetic construct
  source 1..15: mol_type = other DNA
ctgcaatcatggaga

SEQ ID NO: 4494 - DNA, 15 bp, synthetic construct
  source 1..15: mol_type = other DNA
cagattcaccatcct

SEQ ID NO: 4495 - DNA, 15 bp, synthetic construct
  source 1..15: mol_type = other DNA
cacaaaaaagcagac

SEQ ID NO: 4496 - DNA, 15 bp, synthetic construct
  source 1..15: mol_type = other DNA
gggatacagactgta

SEQ ID NO: 4497 - DNA, 15 bp, synthetic construct
  source 1..15: mol_type = other DNA
ctccttttggcgtcg

SEQ ID NO: 4498 - DNA, 15 bp, synthetic construct
  source 1..15: mol_type = other DNA
aaagattcccagccc

SEQ ID NO: 4499 - DNA, 15 bp, synthetic construct
  source 1..15: mol_type = other DNA
ttttggtctcagtgg

SEQ ID NO: 4500 - DNA, 15 bp, synthetic construct
  source 1..15: mol_type = other DNA
gcttgaaggtcttgg

SEQ ID NO: 4501 - DNA, 15 bp, synthetic construct
  source 1..15: mol_type = other DNA
tcgtgagatggtggt

SEQ ID NO: 4502 - DNA, 15 bp, synthetic construct
  source 1..15: mol_type = other DNA
agcacagtatttcac

SEQ ID NO: 4503 - DNA, 15 bp, synthetic construct
  source 1..15: mol_type = other DNA
gtctgcacttggttc

SEQ ID NO: 4504 - DNA, 15 bp, synthetic construct
  source 1..15: mol_type = other DNA
tgcacactttcagag

SEQ ID NO: 4505 - DNA, 15 bp, synthetic construct
  source 1..15: mol_type = other DNA
tgtatgagtcataca

SEQ ID NO: 4506 - DNA, 15 bp, synthetic construct
  source 1..15: mol_type = other DNA
acccagtttggctgg

SEQ ID NO: 4507 - DNA, 15 bp, synthetic construct
  source 1..15: mol_type = other DNA
tgatctcgtggactc

SEQ ID NO: 4508 - DNA, 15 bp, synthetic construct
  source 1..15: mol_type = other DNA
tgttctccggaagaa

SEQ ID NO: 4509 - DNA, 15 bp, synthetic construct
  source 1..15: mol_type = other DNA
gagaaaatggccttg

SEQ ID NO: 4510 - DNA, 15 bp, synthetic construct
  source 1..15: mol_type = other DNA
atccttactgattca

SEQ ID NO: 4511 - DNA, 15 bp, synthetic construct
  source 1..15: mol_type = other DNA
gaaactcccttgtca

SEQ ID NO: 4512 - DNA, 15 bp, synthetic construct
  source 1..15: mol_type = other DNA
agcaggaaaactggg

SEQ ID NO: 4513 - DNA, 15 bp, synthetic construct
  source 1..15: mol_type = other DNA
cataaagtcaccaaa

SEQ ID NO: 4514 - DNA, 15 bp, synthetic construct
  source 1..15: mol_type = other DNA
ggagttggaaggctc

SEQ ID NO: 4515 - DNA, 15 bp, synthetic construct
  source 1..15: mol_type = other DNA
tggtcgttcaagtca

SEQ ID NO: 4516 - DNA, 15 bp, synthetic construct
  source 1..15: mol_type = other DNA
agatgaaggcctacc

SEQ ID NO: 4517 - DNA, 15 bp, synthetic construct
  source 1..15: mol_type = other DNA
ctccacagacacgac

SEQ ID NO: 4518 - DNA, 15 bp, synthetic construct
  source 1..15: mol_type = other DNA
tcgcctttgctttgg

SEQ ID NO: 4519 - DNA, 15 bp, synthetic construct
  source 1..15: mol_type = other DNA
ttactaattcctctc

SEQ ID NO: 4520 - DNA, 15 bp, synthetic construct
  source 1..15: mol_type = other DNA
tgctggagaagtcaa

SEQ ID NO: 4521 - DNA, 15 bp, synthetic construct
  source 1..15: mol_type = other DNA
agccttgtcacatct

SEQ ID NO: 4522 - DNA, 15 bp, synthetic construct
  source 1..15: mol_type = other DNA
ggtcgatatcactgg

SEQ ID NO: 4523 - DNA, 15 bp, synthetic construct
  source 1..15: mol_type = other DNA
ccactggatctgttc

SEQ ID NO: 4524 - DNA, 15 bp, synthetic construct
  source 1..15: mol_type = other DNA
aagatcacatctgtc

SEQ ID NO: 4525 - DNA, 15 bp, synthetic construct
  source 1..15: mol_type = other DNA
aaaagccgcagctcg

SEQ ID NO: 4526 - DNA, 15 bp, synthetic construct
  source 1..15: mol_type = other DNA
ggagaatctcccaga

SEQ ID NO: 4527 - DNA, 15 bp, synthetic construct
  source 1..15: mol_type = other DNA
tagagctgagtcttc

SEQ ID NO: 4528 - DNA, 15 bp, synthetic construct
  source 1..15: mol_type = other DNA
taagctttcccgagg

SEQ ID NO: 4529 - DNA, 15 bp, synthetic construct
  source 1..15: mol_type = other DNA
gggtccaaaacgtgt

SEQ ID NO: 4530 - DNA, 15 bp, synthetic construct
  source 1..15: mol_type = other DNA
tctgacacgcagcca

SEQ ID NO: 4531 - DNA, 15 bp, synthetic construct
  source 1..15: mol_type = other DNA
ggaagggtcttgtag

SEQ ID NO: 4532 - DNA, 15 bp, synthetic construct
  source 1..15: mol_type = other DNA
cgaatccttcctggt

SEQ ID NO: 4533 - DNA, 15 bp, synthetic construct
  source 1..15: mol_type = other DNA
cccttgttgcaagtc

SEQ ID NO: 4534 - DNA, 15 bp, synthetic construct
  source 1..15: mol_type = other DNA
aattcatgccgtagg

SEQ ID NO: 4535 - DNA, 15 bp, synthetic construct
  source 1..15: mol_type = other DNA
atgtatgtacacttc

SEQ ID NO: 4536 - DNA, 15 bp, synthetic construct
  source 1..15: mol_type = other DNA
cgcgttcaagtaagc

SEQ ID NO: 4537 - DNA, 15 bp, synthetic construct
  source 1..15: mol_type = other DNA
gtggaaaagctgcct

SEQ ID NO: 4538 - DNA, 15 bp, synthetic construct
  source 1..15: mol_type = other DNA
ttacctctcatggca

SEQ ID NO: 4539 - DNA, 15 bp, synthetic construct
  source 1..15: mol_type = other DNA
cacaagaagttcctg

SEQ ID NO: 4540 - DNA, 15 bp, synthetic construct
  source 1..15: mol_type = other DNA
gcatcctccatgtcc

SEQ ID NO: 4541 - DNA, 15 bp, synthetic construct
  source 1..15: mol_type = other DNA
atagcgcatccagtt

SEQ ID NO: 4542 - DNA, 15 bp, synthetic construct
  source 1..15: mol_type = other DNA
tcctcattgcagtcc

SEQ ID NO: 4543 - DNA, 15 bp, synthetic construct
  source 1..15: mol_type = other DNA
tgctaaatctcttgt

SEQ ID NO: 4544 - DNA, 15 bp, synthetic construct
  source 1..15: mol_type = other DNA
cttaggaactgtgtc

SEQ ID NO: 4545 - DNA, 15 bp, synthetic construct
  source 1..15: mol_type = other DNA
gtttttccaagcaaa

SEQ ID NO: 4546 - DNA, 15 bp, synthetic construct
  source 1..15: mol_type = other DNA
aaacaactgcctcct

SEQ ID NO: 4547 - DNA, 15 bp, synthetic construct
  source 1..15: mol_type = other DNA
agtccacattctccc

SEQ ID NO: 4548 - DNA, 15 bp, synthetic construct
  source 1..15: mol_type = other DNA
gaagcctttctgcaa

SEQ ID NO: 4549 - DNA, 15 bp, synthetic construct
  source 1..15: mol_type = other DNA
aggtagtgtttctgc

SEQ ID NO: 4550 - DNA, 15 bp, synthetic construct
  source 1..15: mol_type = other DNA
gtggcaccttccctg

SEQ ID NO: 4551 - DNA, 15 bp, synthetic construct
  source 1..15: mol_type = other DNA
actttgcaatgccct

SEQ ID NO: 4552 - DNA, 15 bp, synthetic construct
  source 1..15: mol_type = other DNA
cttcacataggcatc

SEQ ID NO: 4553 - DNA, 15 bp, synthetic construct
  source 1..15: mol_type = other DNA
tcgtcctcagctcct

SEQ ID NO: 4554 - DNA, 15 bp, synthetic construct
  source 1..15: mol_type = other DNA
tgaggtaggcgggct

SEQ ID NO: 4555 - DNA, 15 bp, synthetic construct
  source 1..15: mol_type = other DNA
tagcgtgtaaaccca

SEQ ID NO: 4556 - DNA, 15 bp, synthetic construct
  source 1..15: mol_type = other DNA
tacgaagacagccct

SEQ ID NO: 4557 - DNA, 15 bp, synthetic construct
  source 1..15: mol_type = other DNA
gagcctgatcacagg

SEQ ID NO: 4558 - DNA, 15 bp, synthetic construct
  source 1..15: mol_type = other DNA
cttcagtccaagcat

SEQ ID NO: 4559 - DNA, 15 bp, synthetic construct
  source 1..15: mol_type = other DNA
gtctgaatctccctt

SEQ ID NO: 4560 - DNA, 15 bp, synthetic construct
  source 1..15: mol_type = other DNA
tgctgaagctgtact

SEQ ID NO: 4561 - DNA, 15 bp, synthetic construct
  source 1..15: mol_type = other DNA
gcctcgacagtcagg

SEQ ID NO: 4562 - DNA, 15 bp, synthetic construct
  source 1..15: mol_type = other DNA
ggtactgactcaggg

SEQ ID NO: 4563 - DNA, 15 bp, synthetic construct
  source 1..15: mol_type = other DNA
gagaagcggctacac

SEQ ID NO: 4564 - DNA, 15 bp, synthetic construct
  source 1..15: mol_type = other DNA
gctgcgcttgcactc

SEQ ID NO: 4565 - DNA, 15 bp, synthetic construct
  source 1..15: mol_type = other DNA
tgagtactgctcggg

SEQ ID NO: 4566 - DNA, 15 bp, synthetic construct
  source 1..15: mol_type = other DNA
gttctcaccacacgg

SEQ ID NO: 4567 - DNA, 15 bp, synthetic construct
  source 1..15: mol_type = other DNA
gcaaagcattgtggg

SEQ ID NO: 4568 - DNA, 15 bp, synthetic construct
  source 1..15: mol_type = other DNA
cggatgctacgagcc

SEQ ID NO: 4569 - DNA, 15 bp, synthetic construct
  source 1..15: mol_type = other DNA
ggtggccatgattca

SEQ ID NO: 4570 - DNA, 15 bp, synthetic construct
  source 1..15: mol_type = other DNA
gggacatagtccagg

SEQ ID NO: 4571 - DNA, 15 bp, synthetic construct
  source 1..15: mol_type = other DNA
ctatgtacatggtga

SEQ ID NO: 4572 - DNA, 15 bp, synthetic construct
  source 1..15: mol_type = other DNA
tcgttaatggaggtg

SEQ ID NO: 4573 - DNA, 15 bp, synthetic construct
  source 1..15: mol_type = other DNA
agccgatgagctaaa

SEQ ID NO: 4574 - DNA, 15 bp, synthetic construct
  source 1..15: mol_type = other DNA
cttcttcttcttctc

SEQ ID NO: 4575 - DNA, 15 bp, synthetic construct
  source 1..15: mol_type = other DNA
gtgtagctgtgactg

SEQ ID NO: 4576 - DNA, 15 bp, synthetic construct
  source 1..15: mol_type = other DNA
caggacggactcctc

SEQ ID NO: 4577 - DNA, 15 bp, synthetic construct
  source 1..15: mol_type = other DNA
ttgtgcaggatgaag

SEQ ID NO: 4578 - DNA, 15 bp, synthetic construct
  source 1..15: mol_type = other DNA
catccagagcgtggg

SEQ ID NO: 4579 - DNA, 15 bp, synthetic construct
  source 1..15: mol_type = other DNA
ttggcgcctggagag

SEQ ID NO: 4580 - DNA, 15 bp, synthetic construct
  source 1..15: mol_type = other DNA
acgcagagctcgtct

SEQ ID NO: 4581 - DNA, 15 bp, synthetic construct
  source 1..15: mol_type = other DNA
ccagacttaggccaa

SEQ ID NO: 4582 - DNA, 15 bp, synthetic construct
  source 1..15: mol_type = other DNA
gggaggatacatctc

SEQ ID NO: 4583 - DNA, 15 bp, synthetic construct
  source 1..15: mol_type = other DNA
atcgccttggatggg

SEQ ID NO: 4584 - DNA, 15 bp, synthetic construct
  source 1..15: mol_type = other DNA
cataaagcgtttgcg

SEQ ID NO: 4585 - DNA, 15 bp, synthetic construct
  source 1..15: mol_type = other DNA
caaacatcatgtttg

SEQ ID NO: 4586 - DNA, 15 bp, synthetic construct
  source 1..15: mol_type = other DNA
ttcaacaaactgggt

SEQ ID NO: 4587 - DNA, 15 bp, synthetic construct
  source 1..15: mol_type = other DNA
ggagaggttagagaa

SEQ ID NO: 4588 - DNA, 15 bp, synthetic construct
  source 1..15: mol_type = other DNA
tgagctctggatctg

SEQ ID NO: 4589 - DNA, 15 bp, synthetic construct
  source 1..15: mol_type = other DNA
aatcaggaagctgct

SEQ ID NO: 4590 - DNA, 15 bp, synthetic construct
  source 1..15: mol_type = other DNA
agagtttcaccgtaa

SEQ ID NO: 4591 - DNA, 15 bp, synthetic construct
  source 1..15: mol_type = other DNA
agtcgtatgacaatt

SEQ ID NO: 4592 - DNA, 15 bp, synthetic construct
  source 1..15: mol_type = other DNA
gcatacatcatcaga

SEQ ID NO: 4593 - DNA, 15 bp, synthetic construct
  source 1..15: mol_type = other DNA
ccttgaagtgggtaa

SEQ ID NO: 4594 - DNA, 15 bp, synthetic construct
  source 1..15: mol_type = other DNA
taaattcagcagcaa

SEQ ID NO: 4595 - DNA, 15 bp, synthetic construct
  source 1..15: mol_type = other DNA
taaggacaaacattc

SEQ ID NO: 4596 - DNA, 15 bp, synthetic construct
  source 1..15: mol_type = other DNA
gtgggtttcagaaat

SEQ ID NO: 4597 - DNA, 15 bp, synthetic construct
  source 1..15: mol_type = other DNA
ctctggtcaatggaa

SEQ ID NO: 4598 - DNA, 15 bp, synthetic construct
  source 1..15: mol_type = other DNA
agttggtggactgtc

SEQ ID NO: 4599 - DNA, 15 bp, synthetic construct
  source 1..15: mol_type = other DNA
ctgtcttgaaaaact

SEQ ID NO: 4600 - DNA, 15 bp, synthetic construct
  source 1..15: mol_type = other DNA
tgtttaagcacatcg

SEQ ID NO: 4601 - DNA, 15 bp, synthetic construct
  source 1..15: mol_type = other DNA
gtacgtctttagagg

SEQ ID NO: 4602 - DNA, 15 bp, synthetic construct
  source 1..15: mol_type = other DNA
gcacttatactggtc

SEQ ID NO: 4603 - DNA, 15 bp, synthetic construct
  source 1..15: mol_type = other DNA
gacatgggtgggaac

SEQ ID NO: 4604 - DNA, 15 bp, synthetic construct
  source 1..15: mol_type = other DNA
actgcgggtggaaca

SEQ ID NO: 4605 - DNA, 15 bp, synthetic construct
  source 1..15: mol_type = other DNA
cccaggttttgtcag

SEQ ID NO: 4606 - DNA, 15 bp, synthetic construct
  source 1..15: mol_type = other DNA
aagaagcgtgtccgg

SEQ ID NO: 4607 - DNA, 15 bp, synthetic construct
  source 1..15: mol_type = other DNA
atgacgtgggcgtgg

SEQ ID NO: 4608 - DNA, 15 bp, synthetic construct
  source 1..15: mol_type = other DNA
gctgaacttgcctga

SEQ ID NO: 4609 - DNA, 15 bp, synthetic construct
  source 1..15: mol_type = other DNA
gatgttgccagggta

SEQ ID NO: 4610 - DNA, 15 bp, synthetic construct
  source 1..15: mol_type = other DNA
aacacagtaacagat

SEQ ID NO: 4611 - DNA, 15 bp, synthetic construct
  source 1..15: mol_type = other DNA
gaaggaattggatct

SEQ ID NO: 4612 - DNA, 15 bp, synthetic construct
  source 1..15: mol_type = other DNA
cccatgaccgatagt

SEQ ID NO: 4613 - DNA, 15 bp, synthetic construct
  source 1..15: mol_type = other DNA
tgtggtaacgggcgc

SEQ ID NO: 4614 - DNA, 15 bp, synthetic construct
  source 1..15: mol_type = other DNA
ttcccaaatctccag

SEQ ID NO: 4615 - DNA, 15 bp, synthetic construct
  source 1..15: mol_type = other DNA
gaaagttggctcggc

SEQ ID NO: 4616 - DNA, 15 bp, synthetic construct
  source 1..15: mol_type = other DNA
gtgccaagtagtagt

SEQ ID NO: 4617 - DNA, 15 bp, synthetic construct
  source 1..15: mol_type = other DNA
ggtactacagctgat

SEQ ID NO: 4618 - DNA, 15 bp, synthetic construct
  source 1..15: mol_type = other DNA
aagtgaagcgccgcg

SEQ ID NO: 4619 - DNA, 15 bp, synthetic construct
  source 1..15: mol_type = other DNA
tcttgtggcacaagt

SEQ ID NO: 4620 - DNA, 15 bp, synthetic construct
  source 1..15: mol_type = other DNA
ttgacagtggtactt

SEQ ID NO: 4621 - DNA, 15 bp, synthetic construct
  source 1..15: mol_type = other DNA
ttacattgatggttg

SEQ ID NO: 4622 - DNA, 15 bp, synthetic construct
  source 1..15: mol_type = other DNA
tgaaaccctgaggaa

SEQ ID NO: 4623 - DNA, 15 bp, synthetic construct
  source 1..15: mol_type = other DNA
tgtttgcagacagct

SEQ ID NO: 4624 - DNA, 15 bp, synthetic construct
  source 1..15: mol_type = other DNA
ccaaacgtccctcac

SEQ ID NO: 4625 - DNA, 15 bp, synthetic construct
  source 1..15: mol_type = other DNA
aagagcttccaagga

SEQ ID NO: 4626 - DNA, 15 bp, synthetic construct
  source 1..15: mol_type = other DNA
ggatcaatatgtcca

SEQ ID NO: 4627 - DNA, 15 bp, synthetic construct
  source 1..15: mol_type = other DNA
actttacatccctct

SEQ ID NO: 4628 - DNA, 15 bp, synthetic construct
  source 1..15: mol_type = other DNA
ctgagcagagttcag

SEQ ID NO: 4629 - DNA, 15 bp, synthetic construct
  source 1..15: mol_type = other DNA
catacactgattatc

SEQ ID NO: 4630 - DNA, 15 bp, synthetic construct
  source 1..15: mol_type = other DNA
agggtaccagaccaa

SEQ ID NO: 4631 - DNA, 15 bp, synthetic construct
  source 1..15: mol_type = other DNA
taaaagctaaagcag

SEQ ID NO: 4632 - DNA, 15 bp, synthetic construct
  source 1..15: mol_type = other DNA
cttcccaggtgacca

SEQ ID NO: 4633 - DNA, 15 bp, synthetic construct
  source 1..15: mol_type = other DNA
gtggtggatggcaag

SEQ ID NO: 4634 - DNA, 15 bp, synthetic construct
  source 1..15: mol_type = other DNA
ggtcccttgtcatgg

SEQ ID NO: 4635 - DNA, 15 bp, synthetic construct
  source 1..15: mol_type = other DNA
aaacccacccagatg

SEQ ID NO: 4636 - DNA, 15 bp, synthetic construct
  source 1..15: mol_type = other DNA
gtctgagtgagacgt

SEQ ID NO: 4637 - DNA, 15 bp, synthetic construct
  source 1..15: mol_type = other DNA
tagaccactcagtgt

SEQ ID NO: 4638 - DNA, 15 bp, synthetic construct
  source 1..15: mol_type = other DNA
agttgcggaatgtgc

SEQ ID NO: 4639 - DNA, 15 bp, synthetic construct
  source 1..15: mol_type = other DNA
ggcacacctggtcac

SEQ ID NO: 4640 - DNA, 15 bp, synthetic construct
  source 1..15: mol_type = other DNA
aggctctttgtgtac

SEQ ID NO: 4641 - DNA, 15 bp, synthetic construct
  source 1..15: mol_type = other DNA
ttttcattactctcc

SEQ ID NO: 4642 - DNA, 15 bp, synthetic construct
  source 1..15: mol_type = other DNA
ccgaagtgtcaccaa

SEQ ID NO: 4643 - DNA, 15 bp, synthetic construct
  source 1..15: mol_type = other DNA
ttacaggcaactacc

SEQ ID NO: 4644 - DNA, 15 bp, synthetic construct
  source 1..15: mol_type = other DNA
tgctcttcaactcgg

SEQ ID NO: 4645 - DNA, 15 bp, synthetic construct
  source 1..15: mol_type = other DNA
gaaggtggtccaagg

SEQ ID NO: 4646 - DNA, 15 bp, synthetic construct
  source 1..15: mol_type = other DNA
agggaatcacgccac

SEQ ID NO: 4647 - DNA, 15 bp, synthetic construct
  source 1..15: mol_type = other DNA
tcaccctgaacttag

SEQ ID NO: 4648 - DNA, 15 bp, synthetic construct
  source 1..15: mol_type = other DNA
gagccagtctttgaa

SEQ ID NO: 4649 - DNA, 15 bp, synthetic construct
  source 1..15: mol_type = other DNA
tagcagttgagccag

SEQ ID NO: 4650 - DNA, 15 bp, synthetic construct
  source 1..15: mol_type = other DNA
caggtggcttagctc

SEQ ID NO: 4651 - DNA, 15 bp, synthetic construct
  source 1..15: mol_type = other DNA
cccactttcataggg

SEQ ID NO: 4652 - DNA, 15 bp, synthetic construct
  source 1..15: mol_type = other DNA
caaaaacctagaagg

SEQ ID NO: 4653 - DNA, 15 bp, synthetic construct
  source 1..15: mol_type = other DNA
ggacttgatcttctt

SEQ ID NO: 4654 - DNA, 15 bp, synthetic construct
  source 1..15: mol_type = other DNA
tgacaaggtcaccaa

SEQ ID NO: 4655 - DNA, 15 bp, synthetic construct
  source 1..15: mol_type = other DNA
aacctatttggtgaa

SEQ ID NO: 4656 - DNA, 15 bp, synthetic construct
  source 1..15: mol_type = other DNA
aacttgcaagaggct

SEQ ID NO: 4657 - DNA, 15 bp, synthetic construct
  source 1..15: mol_type = other DNA
aacacccaaccactc

SEQ ID NO: 4658 - DNA, 15 bp, synthetic construct
  source 1..15: mol_type = other DNA
gcacaaaatgtttcc

SEQ ID NO: 4659 - DNA, 15 bp, synthetic construct
  source 1..15: mol_type = other DNA
aacgctggcggaagt

SEQ ID NO: 4660 - DNA, 15 bp, synthetic construct
  source 1..15: mol_type = other DNA
aagtgtctcacctag

SEQ ID NO: 4661 - DNA, 15 bp, synthetic construct
  source 1..15: mol_type = other DNA
atggcttgtgtacag

SEQ ID NO: 4662 - DNA, 15 bp, synthetic construct
  source 1..15: mol_type = other DNA
gtgcatctgtaagat

SEQ ID NO: 4663 - DNA, 15 bp, synthetic construct
  source 1..15: mol_type = other DNA
acttcatgtccaaaa

SEQ ID NO: 4664 - DNA, 15 bp, synthetic construct
  source 1..15: mol_type = other DNA
cgtttgaatgaattc

SEQ ID NO: 4665 - DNA, 15 bp, synthetic construct
  source 1..15: mol_type = other DNA
gacaggaaaccctca

SEQ ID NO: 4666 - DNA, 15 bp, synthetic construct
  source 1..15: mol_type = other DNA
gcatgttgcacagcc

SEQ ID NO: 4667 - DNA, 15 bp, synthetic construct
  source 1..15: mol_type = other DNA
tgaactgcggcggct

SEQ ID NO: 4668 - DNA, 15 bp, synthetic construct
  source 1..15: mol_type = other DNA
gtaagtaaaatccac

SEQ ID NO: 4669 - DNA, 15 bp, synthetic construct
  source 1..15: mol_type = other DNA
ggccctaattctgag

SEQ ID NO: 4670 - DNA, 15 bp, synthetic construct
  source 1..15: mol_type = other DNA
gtatatagacagtgc

SEQ ID NO: 4671 - DNA, 15 bp, synthetic construct
  source 1..15: mol_type = other DNA
cttttgctgtcaggt

SEQ ID NO: 4672 - DNA, 15 bp, synthetic construct
  source 1..15: mol_type = other DNA
aaggatgctgtatta

SEQ ID NO: 4673 - DNA, 15 bp, synthetic construct
  source 1..15: mol_type = other DNA
ggagaattacagtta

SEQ ID NO: 4674 - DNA, 15 bp, synthetic construct
  source 1..15: mol_type = other DNA
acatactccaatctg

SEQ ID NO: 4675 - DNA, 15 bp, synthetic construct
  source 1..15: mol_type = other DNA
gtgatggcaagcgaa

SEQ ID NO: 4676 - DNA, 15 bp, synthetic construct
  source 1..15: mol_type = other DNA
gtccctcttttgaag

SEQ ID NO: 4677 - DNA, 15 bp, synthetic construct
  source 1..15: mol_type = other DNA
atcatctccagttcc

SEQ ID NO: 4678 - DNA, 15 bp, synthetic construct
  source 1..15: mol_type = other DNA
gttggcttccaaccc

SEQ ID NO: 4679 - DNA, 15 bp, synthetic construct
  source 1..15: mol_type = other DNA
acacttcttcctttg

SEQ ID NO: 4680 - DNA, 15 bp, synthetic construct
  source 1..15: mol_type = other DNA
ctaacgctagcacca

SEQ ID NO: 4681 - DNA, 15 bp, synthetic construct
  source 1..15: mol_type = other DNA
ctgataccgatttct

SEQ ID NO: 4682 - DNA, 15 bp, synthetic construct
  source 1..15: mol_type = other DNA
acagtcagctttgca

SEQ ID NO: 4683 - DNA, 15 bp, synthetic construct
  source 1..15: mol_type = other DNA
tgggcttacatgaca

SEQ ID NO: 4684 - DNA, 15 bp, synthetic construct
  source 1..15: mol_type = other DNA
taggcgtgctgtgat

SEQ ID NO: 4685 - DNA, 15 bp, synthetic construct
  source 1..15: mol_type = other DNA
tgcatagtaacccag

SEQ ID NO: 4686 - DNA, 15 bp, synthetic construct
  source 1..15: mol_type = other DNA
ctccaaggattccat

SEQ ID NO: 4687 - DNA, 15 bp, synthetic construct
  source 1..15: mol_type = other DNA
ttcgcttcttctgct

SEQ ID NO: 4688 - DNA, 15 bp, synthetic construct
  source 1..15: mol_type = other DNA
aaccaggttctctga

SEQ ID NO: 4689 - DNA, 15 bp, synthetic construct
  source 1..15: mol_type = other DNA
aacactgtcctttga

SEQ ID NO: 4690 - DNA, 15 bp, synthetic construct
  source 1..15: mol_type = other DNA
tgcaagtcatcgtct

SEQ ID NO: 4691 - DNA, 15 bp, synthetic construct
  source 1..15: mol_type = other DNA
ccctggttcagggtg

SEQ ID NO: 4692 - DNA, 15 bp, synthetic construct
  source 1..15: mol_type = other DNA
tttgacataacaggc

SEQ ID NO: 4693 - DNA, 15 bp, synthetic construct
  source 1..15: mol_type = other DNA
ctcagctgcttgtct

SEQ ID NO: 4694 - DNA, 15 bp, synthetic construct
  source 1..15: mol_type = other DNA
tcctccatgatgtgt

SEQ ID NO: 4695 - DNA, 15 bp, synthetic construct
  source 1..15: mol_type = other DNA
ttattgaagagagca

SEQ ID NO: 4696 - DNA, 15 bp, synthetic construct
  source 1..15: mol_type = other DNA
ctgaaaacagagaaa

SEQ ID NO: 4697 - DNA, 15 bp, synthetic construct
  source 1..15: mol_type = other DNA
gaaaagttccatggc

SEQ ID NO: 4698 - DNA, 15 bp, synthetic construct
  source 1..15: mol_type = other DNA
ggagggtttcgatga

SEQ ID NO: 4699 - DNA, 15 bp, synthetic construct
  source 1..15: mol_type = other DNA
ggctgatggtcacca

SEQ ID NO: 4700 - DNA, 15 bp, synthetic construct
  source 1..15: mol_type = other DNA
tgtccagaggtaaag

SEQ ID NO: 4701 - DNA, 15 bp, synthetic construct
  source 1..15: mol_type = other DNA
accaagccagtggtt

SEQ ID NO: 4702 - DNA, 15 bp, synthetic construct
  source 1..15: mol_type = other DNA
gttttcagaagaagc

SEQ ID NO: 4703 - DNA, 15 bp, synthetic construct
  source 1..15: mol_type = other DNA
ccagcttcatgacag

SEQ ID NO: 4704 - DNA, 15 bp, synthetic construct
  source 1..15: mol_type = other DNA
cttcagaagcctctg

SEQ ID NO: 4705 - DNA, 15 bp, synthetic construct
  source 1..15: mol_type = other DNA
gcactttgttgatga

SEQ ID NO: 4706 - DNA, 15 bp, synthetic construct
  source 1..15: mol_type = other DNA
ctccacaaggtgctc

SEQ ID NO: 4707 - DNA, 15 bp, synthetic construct
  source 1..15: mol_type = other DNA
tcttgatgtcacacc

SEQ ID NO: 4708 - DNA, 15 bp, synthetic construct
  source 1..15: mol_type = other DNA
tttcacgggtcacta

SEQ ID NO: 4709 - DNA, 15 bp, synthetic construct
  source 1..15: mol_type = other DNA
ccgaggtttcaaagg

SEQ ID NO: 4710 - DNA, 15 bp, synthetic construct
  source 1..15: mol_type = other DNA
taataaacccacagg

SEQ ID NO: 4711 - DNA, 15 bp, synthetic construct
  source 1..15: mol_type = other DNA
tcctatgcgagaaac

SEQ ID NO: 4712 - DNA, 15 bp, synthetic construct
  source 1..15: mol_type = other DNA
gcattcacaggacta

SEQ ID NO: 4713 - DNA, 15 bp, synthetic construct
  source 1..15: mol_type = other DNA
aggagctgcgtgtcc

SEQ ID NO: 4714 - DNA, 15 bp, synthetic construct
  source 1..15: mol_type = other DNA
aagcagtcggatccc

SEQ ID NO: 4715 - DNA, 15 bp, synthetic construct
  source 1..15: mol_type = other DNA
gcttctccaacgtgg

SEQ ID NO: 4716 - DNA, 15 bp, synthetic construct
  source 1..15: mol_type = other DNA
aaacccattggatta

SEQ ID NO: 4717 - DNA, 15 bp, synthetic construct
  source 1..15: mol_type = other DNA
ccagatgagtggtcg

SEQ ID NO: 4718 - DNA, 15 bp, synthetic construct
  source 1..15: mol_type = other DNA
tactgggctatgaac

SEQ ID NO: 4719 - DNA, 15 bp, synthetic construct
  source 1..15: mol_type = other DNA
ggagtcgctgaaacg

SEQ ID NO: 4720 - DNA, 15 bp, synthetic construct
  source 1..15: mol_type = other DNA
aaatgaacccagcct

SEQ ID NO: 4721 - DNA, 15 bp, synthetic construct
  source 1..15: mol_type = other DNA
gattcctctccgctc

SEQ ID NO: 4722 - DNA, 15 bp, synthetic construct
  source 1..15: mol_type = other DNA
tgagcgacaaactca

SEQ ID NO: 4723 - DNA, 15 bp, synthetic construct
  source 1..15: mol_type = other DNA
accagtaagtgctac

SEQ ID NO: 4724 - DNA, 15 bp, synthetic construct
  source 1..15: mol_type = other DNA
atagattagggaagc

SEQ ID NO: 4725 - DNA, 15 bp, synthetic construct
  source 1..15: mol_type = other DNA
catgcggtacagcat

SEQ ID NO: 4726 - DNA, 15 bp, synthetic construct
  source 1..15: mol_type = other DNA
gaataccggacacag

SEQ ID NO: 4727 - DNA, 15 bp, synthetic construct
  source 1..15: mol_type = other DNA
tcagccaaaacaaaa

SEQ ID NO: 4728 - DNA, 15 bp, synthetic construct
  source 1..15: mol_type = other DNA
ttggctgaacctacc

SEQ ID NO: 4729 - DNA, 15 bp, synthetic construct
  source 1..15: mol_type = other DNA
aatggtgcgatgcca

SEQ ID NO: 4730 - DNA, 15 bp, synthetic construct
  source 1..15: mol_type = other DNA
cggtcacgtcacaca

SEQ ID NO: 4731 - DNA, 15 bp, synthetic construct
  source 1..15: mol_type = other DNA
gtcatacactccagg

SEQ ID NO: 4732 - DNA, 15 bp, synthetic construct
  source 1..15: mol_type = other DNA
cctccaaggagtagc

SEQ ID NO: 4733 - DNA, 15 bp, synthetic construct
  source 1..15: mol_type = other DNA
gtgcattcaacctgg

SEQ ID NO: 4734 - DNA, 15 bp, synthetic construct
  source 1..15: mol_type = other DNA
tcgcacagagcattc

SEQ ID NO: 4735 - DNA, 15 bp, synthetic construct
  source 1..15: mol_type = other DNA
acgaacccattggct

SEQ ID NO: 4736 - DNA, 15 bp, synthetic construct
  source 1..15: mol_type = other DNA
gatctttcccggaac

SEQ ID NO: 4737 - DNA, 15 bp, synthetic construct
  source 1..15: mol_type = other DNA
tcatagcttccgtgg

SEQ ID NO: 4738 - DNA, 15 bp, synthetic construct
  source 1..15: mol_type = other DNA
cacattcaccgtggc

SEQ ID NO: 4739 - DNA, 15 bp, synthetic construct
  source 1..15: mol_type = other DNA
tttgcctattgttgg

SEQ ID NO: 4740 - DNA, 15 bp, synthetic construct
  source 1..15: mol_type = other DNA
gttgtcccaattccc

SEQ ID NO: 4741 - DNA, 15 bp, synthetic construct
  source 1..15: mol_type = other DNA
cttcttgctgcacct

SEQ ID NO: 4742 - DNA, 15 bp, synthetic construct
  source 1..15: mol_type = other DNA
agagaaactgtgaag

SEQ ID NO: 4743 - DNA, 15 bp, synthetic construct
  source 1..15: mol_type = other DNA
ctctgagttcccgga

SEQ ID NO: 4744 - DNA, 15 bp, synthetic construct
  source 1..15: mol_type = other DNA
tacttcggctgaggc

SEQ ID NO: 4745 - DNA, 15 bp, synthetic construct
  source 1..15: mol_type = other DNA
cctgagatgtgcact

SEQ ID NO: 4746 - DNA, 15 bp, synthetic construct
  source 1..15: mol_type = other DNA
tgaattctccaatag

SEQ ID NO: 4747 - DNA, 15 bp, synthetic construct
  source 1..15: mol_type = other DNA
tgtagcctcgctcgg

SEQ ID NO: 4748 - DNA, 15 bp, synthetic construct
  source 1..15: mol_type = other DNA
atgtgaagtcagcca

SEQ ID NO: 4749 - DNA, 15 bp, synthetic construct
  source 1..15: mol_type = other DNA
gttccatgggaagct

SEQ ID NO: 4750 - DNA, 15 bp, synthetic construct
  source 1..15: mol_type = other DNA
ccctatcacagctga

SEQ ID NO: 4751 - DNA, 15 bp, synthetic construct
  source 1..15: mol_type = other DNA
tgtgggcattcaaca

SEQ ID NO: 4752 - DNA, 15 bp, synthetic construct
  source 1..15: mol_type = other DNA
gatgatttgaaggtg

SEQ ID NO: 4753 - DNA, 15 bp, synthetic construct
  source 1..15: mol_type = other DNA
caaggctttggcagc

SEQ ID NO: 4754 - DNA, 15 bp, synthetic construct
  source 1..15: mol_type = other DNA
aagtttcccagtggg

SEQ ID NO: 4755 - DNA, 15 bp, synthetic construct
  source 1..15: mol_type = other DNA
tgctaatgtcaggag

SEQ ID NO: 4756 - DNA, 15 bp, synthetic construct
  source 1..15: mol_type = other DNA
acccataacggaaac

SEQ ID NO: 4757 - DNA, 15 bp, synthetic construct
  source 1..15: mol_type = other DNA
ttccataagtccctc

SEQ ID NO: 4758 - DNA, 15 bp, synthetic construct
  source 1..15: mol_type = other DNA
accagtttccaaatg

SEQ ID NO: 4759 - DNA, 15 bp, synthetic construct
  source 1..15: mol_type = other DNA
atggtaagtccagca

SEQ ID NO: 4760 - DNA, 15 bp, synthetic construct
  source 1..15: mol_type = other DNA
gtttgacgtaggagg

SEQ ID NO: 4761 - DNA, 15 bp, synthetic construct
  source 1..15: mol_type = other DNA
caagggtctcaggtc

SEQ ID NO: 4762 - DNA, 15 bp, synthetic construct
  source 1..15: mol_type = other DNA
caaatgataaatgcc

SEQ ID NO: 4763 - DNA, 15 bp, synthetic construct
  source 1..15: mol_type = other DNA
gttgggctcaccatc

SEQ ID NO: 4764 - DNA, 15 bp, synthetic construct
  source 1..15: mol_type = other DNA
gcaaagtcagccatc

SEQ ID NO: 4765 - DNA, 15 bp, synthetic construct
  source 1..15: mol_type = other DNA
ttgaccagattccag

SEQ ID NO: 4766 - DNA, 15 bp, synthetic construct
  source 1..15: mol_type = other DNA
gccactggaatgaag

SEQ ID NO: 4767 - DNA, 15 bp, synthetic construct
  source 1..15: mol_type = other DNA
cccaaatctggtgct

SEQ ID NO: 4768 - DNA, 15 bp, synthetic construct
  source 1..15: mol_type = other DNA
aataggatggtccaa

SEQ ID NO: 4769 - DNA, 15 bp, synthetic construct
  source 1..15: mol_type = other DNA
ttccggattcctatc

SEQ ID NO: 4770 - DNA, 15 bp, synthetic construct
  source 1..15: mol_type = other DNA
gagtacagtccatgg

SEQ ID NO: 4771 - DNA, 15 bp, synthetic construct
  source 1..15: mol_type = other DNA
tgttccttcagagca

SEQ ID NO: 4772 - DNA, 15 bp, synthetic construct
  source 1..15: mol_type = other DNA
gttggtcaggtagaa

SEQ ID NO: 4773 - DNA, 15 bp, synthetic construct
  source 1..15: mol_type = other DNA
tacatgcagaggtaa

SEQ ID NO: 4774 - DNA, 15 bp, synthetic construct
  source 1..15: mol_type = other DNA
gcgtcatcgttccat

SEQ ID NO: 4775 - DNA, 15 bp, synthetic construct
  source 1..15: mol_type = other DNA
tgttggttcccaccc

SEQ ID NO: 4776 - DNA, 15 bp, synthetic construct
  source 1..15: mol_type = other DNA
cactgaatgtcaaca

SEQ ID NO: 4777 - DNA, 15 bp, synthetic construct
  source 1..15: mol_type = other DNA
caggtgtaattattg

SEQ ID NO: 4778 - DNA, 15 bp, synthetic construct
  source 1..15: mol_type = other DNA
tgaaaggcagagtct

SEQ ID NO: 4779 - DNA, 15 bp, synthetic construct
  source 1..15: mol_type = other DNA
aattgtctcggcaga

SEQ ID NO: 4780 - DNA, 15 bp, synthetic construct
  source 1..15: mol_type = other DNA
agtctcacatcctcc

SEQ ID NO: 4781 - DNA, 15 bp, synthetic construct
  source 1..15: mol_type = other DNA
ccagtgcagaactga

SEQ ID NO: 4782 - DNA, 15 bp, synthetic construct
  source 1..15: mol_type = other DNA
taccgagcagtcacc

SEQ ID NO: 4783 - DNA, 15 bp, synthetic construct
  source 1..15: mol_type = other DNA
acaattccttctgtt

SEQ ID NO: 4784 - DNA, 15 bp, synthetic construct
  source 1..15: mol_type = other DNA
tctaggttgtgggct

SEQ ID NO: 4785 - DNA, 15 bp, synthetic construct
  source 1..15: mol_type = other DNA
ccagagaagagccat

SEQ ID NO: 4786 - DNA, 15 bp, synthetic construct
  source 1..15: mol_type = other DNA
tcaccctttgaggta

SEQ ID NO: 4787 - DNA, 15 bp, synthetic construct
  source 1..15: mol_type = other DNA
aaaggcaaatgttct

SEQ ID NO: 4788 - DNA, 15 bp, synthetic construct
  source 1..15: mol_type = other DNA
catatctagctcatg

SEQ ID NO: 4789 - DNA, 15 bp, synthetic construct
  source 1..15: mol_type = other DNA
agccatgtaggcagc

SEQ ID NO: 4790 - DNA, 15 bp, synthetic construct
  source 1..15: mol_type = other DNA
gacagcctttgttcc

SEQ ID NO: 4791 - DNA, 15 bp, synthetic construct
  source 1..15: mol_type = other DNA
ttaagtctcagaggg

SEQ ID NO: 4792 - DNA, 15 bp, synthetic construct
  source 1..15: mol_type = other DNA
agtcagaggaagcct

SEQ ID NO: 4793 - DNA, 15 bp, synthetic construct
  source 1..15: mol_type = other DNA
tgtttgggactgtgc

SEQ ID NO: 4794 - DNA, 15 bp, synthetic construct
  source 1..15: mol_type = other DNA
gtttccgtctctgca

SEQ ID NO: 4795 - DNA, 15 bp, synthetic construct
  source 1..15: mol_type = other DNA
aactccagagagtct

SEQ ID NO: 4796 - DNA, 15 bp, synthetic construct
  source 1..15: mol_type = other DNA
agggatgaaggagcc

SEQ ID NO: 4797 - DNA, 15 bp, synthetic construct
  source 1..15: mol_type = other DNA
gcaagggaagaatgg

SEQ ID NO: 4798 - DNA, 15 bp, synthetic construct
  source 1..15: mol_type = other DNA
gagaccttgacgtgg

SEQ ID NO: 4799 - DNA, 15 bp, synthetic construct
  source 1..15: mol_type = other DNA
actgtgggtgttctg

SEQ ID NO: 4800 - DNA, 15 bp, synthetic construct
  source 1..15: mol_type = other DNA
agaatgcctgctcct

SEQ ID NO: 4801 - DNA, 15 bp, synthetic construct
  source 1..15: mol_type = other DNA
tagtgtctgacacat

SEQ ID NO: 4802 - DNA, 15 bp, synthetic construct
  source 1..15: mol_type = other DNA
tgcagtggaaaagcc

SEQ ID NO: 4803 - DNA, 15 bp, synthetic construct
  source 1..15: mol_type = other DNA
ctgtccctgtatgag

SEQ ID NO: 4804 - DNA, 15 bp, synthetic construct
  source 1..15: mol_type = other DNA
gattagaaagcaggg

SEQ ID NO: 4805 - DNA, 15 bp, synthetic construct
  source 1..15: mol_type = other DNA
gcctcaacctgctgc

SEQ ID NO: 4806 - DNA, 15 bp, synthetic construct
  source 1..15: mol_type = other DNA
attggtgaagatctc

SEQ ID NO: 4807 - DNA, 15 bp, synthetic construct
  source 1..15: mol_type = other DNA
ggactctcctgtggg

SEQ ID NO: 4808 - DNA, 15 bp, synthetic construct
  source 1..15: mol_type = other DNA
ggtgcaagcactggg

SEQ ID NO: 4809 - DNA, 15 bp, synthetic construct
  source 1..15: mol_type = other DNA
cacaagacgcttttc

SEQ ID NO: 4810 - DNA, 15 bp, synthetic construct
  source 1..15: mol_type = other DNA
ggttttacaaagcct

SEQ ID NO: 4811 - DNA, 15 bp, synthetic construct
  source 1..15: mol_type = other DNA
aggatattggcagca

SEQ ID NO: 4812 - DNA, 15 bp, synthetic construct
  source 1..15: mol_type = other DNA
ctacgaccagctgtt

SEQ ID NO: 4813 - DNA, 15 bp, synthetic construct
  source 1..15: mol_type = other DNA
cgacactttggccat

SEQ ID NO: 4814 - DNA, 15 bp, synthetic construct
  source 1..15: mol_type = other DNA
cagagcgtggagagg

SEQ ID NO: 4815 - DNA, 15 bp, synthetic construct
  source 1..15: mol_type = other DNA
tgctgagaaacatgt

SEQ ID NO: 4816 - DNA, 15 bp, synthetic construct
  source 1..15: mol_type = other DNA
agtcatgctcaggaa

SEQ ID NO: 4817 - DNA, 15 bp, synthetic construct
  source 1..15: mol_type = other DNA
catcatcgttgggct

SEQ ID NO: 4818 - DNA, 15 bp, synthetic construct
  source 1..15: mol_type = other DNA
gtttgtgatgcggcc

SEQ ID NO: 4819 - DNA, 15 bp, synthetic construct
  source 1..15: mol_type = other DNA
ttttcctcctcgtcc

SEQ ID NO: 4820 - DNA, 15 bp, synthetic construct
  source 1..15: mol_type = other DNA
cctcaaggcttggtg

SEQ ID NO: 4821 - DNA, 15 bp, synthetic construct
  source 1..15: mol_type = other DNA
ccatcatttgcatct

SEQ ID NO: 4822 - DNA, 15 bp, synthetic construct
  source 1..15: mol_type = other DNA
ttccaagtagaggtc

SEQ ID NO: 4823 - DNA, 15 bp, synthetic construct
  source 1..15: mol_type = other DNA
caggacctagtgaac

SEQ ID NO: 4824 - DNA, 15 bp, synthetic construct
  source 1..15: mol_type = other DNA
agtctgagtcaaagc

SEQ ID NO: 4825 - DNA, 15 bp, synthetic construct
  source 1..15: mol_type = other DNA
gggcactctcaacag

SEQ ID NO: 4826 - DNA, 15 bp, synthetic construct
  source 1..15: mol_type = other DNA
aagtgctggaccatg

SEQ ID NO: 4827 - DNA, 15 bp, synthetic construct
  source 1..15: mol_type = other DNA
cgagtaccaaggctg

SEQ ID NO: 4828 - DNA, 15 bp, synthetic construct
  source 1..15: mol_type = other DNA
tttgctgttccagca

SEQ ID NO: 4829 - DNA, 15 bp, synthetic construct
  source 1..15: mol_type = other DNA
agacacctgcattcc

SEQ ID NO: 4830 - DNA, 15 bp, synthetic construct
  source 1..15: mol_type = other DNA
ttgaagacccggcct

SEQ ID NO: 4831 - DNA, 15 bp, synthetic construct
  source 1..15: mol_type = other DNA
gcgtccggatcagca

SEQ ID NO: 4832 - DNA, 15 bp, synthetic construct
  source 1..15: mol_type = other DNA
gctgctttctctgtg

SEQ ID NO: 4833 - DNA, 15 bp, synthetic construct
  source 1..15: mol_type = other DNA
agtccctctcagggt

SEQ ID NO: 4834 - DNA, 15 bp, synthetic construct
  source 1..15: mol_type = other DNA
ccattagggagctcc

SEQ ID NO: 4835 - DNA, 15 bp, synthetic construct
  source 1..15: mol_type = other DNA
ggagaggcgaatgaa

SEQ ID NO: 4836 - DNA, 15 bp, synthetic construct
  source 1..15: mol_type = other DNA
tttgtgaagcgtggc

SEQ ID NO: 4837 - DNA, 15 bp, synthetic construct
  source 1..15: mol_type = other DNA
ttaattccagagcat

SEQ ID NO: 4838 - DNA, 15 bp, synthetic construct
  source 1..15: mol_type = other DNA
agcaaagatcaggcc

SEQ ID NO: 4839 - DNA, 15 bp, synthetic construct
  source 1..15: mol_type = other DNA
ggttggatccaccat

SEQ ID NO: 4840 - DNA, 15 bp, synthetic construct
  source 1..15: mol_type = other DNA
ccaccgagtagctga

SEQ ID NO: 4841 - DNA, 15 bp, synthetic construct
  source 1..15: mol_type = other DNA
tggacacgttgagtc

SEQ ID NO: 4842 - DNA, 15 bp, synthetic construct
  source 1..15: mol_type = other DNA
gatcttcctcttgtt

SEQ ID NO: 4843 - DNA, 15 bp, synthetic construct
  source 1..15: mol_type = other DNA
atccagcacaatctc

SEQ ID NO: 4844 - DNA, 15 bp, synthetic construct
  source 1..15: mol_type = other DNA
aggtgccatctggac

SEQ ID NO: 4845 - DNA, 15 bp, synthetic construct
  source 1..15: mol_type = other DNA
ccaaatgttgagcat

SEQ ID NO: 4846 - DNA, 15 bp, synthetic construct
  source 1..15: mol_type = other DNA
tggaatcccagtcgg

SEQ ID NO: 4847 - DNA, 15 bp, synthetic construct
  source 1..15: mol_type = other DNA
cttcccggtgagatg

SEQ ID NO: 4848 - DNA, 15 bp, synthetic construct
  source 1..15: mol_type = other DNA
ggcataggagcagag

SEQ ID NO: 4849 - DNA, 15 bp, synthetic construct
  source 1..15: mol_type = other DNA
gtagtattggaatga

SEQ ID NO: 4850 - DNA, 15 bp, synthetic construct
  source 1..15: mol_type = other DNA
gacggaagggtgcaa

SEQ ID NO: 4851 - DNA, 15 bp, synthetic construct
  source 1..15: mol_type = other DNA
aggccgtagtggcag

SEQ ID NO: 4852 - DNA, 15 bp, synthetic construct
  source 1..15: mol_type = other DNA
ggatgatgatccagg

SEQ ID NO: 4853 - DNA, 15 bp, synthetic construct
  source 1..15: mol_type = other DNA
acacgccatagttga

SEQ ID NO: 4854 - DNA, 15 bp, synthetic construct
  source 1..15: mol_type = other DNA
aagaagccgatcagt

SEQ ID NO: 4855 - DNA, 15 bp, synthetic construct
  source 1..15: mol_type = other DNA
cttcattctcccgag

SEQ ID NO: 4856 - DNA, 15 bp, synthetic construct
  source 1..15: mol_type = other DNA
gcgaaagcgaaaatg

SEQ ID NO: 4857 - DNA, 15 bp, synthetic construct
  source 1..15: mol_type = other DNA
tctatggtcttcttg

SEQ ID NO: 4858 - DNA, 15 bp, synthetic construct
  source 1..15: mol_type = other DNA
ggcaatgatgcggat

SEQ ID NO: 4859 - DNA, 15 bp, synthetic construct
  source 1..15: mol_type = other DNA
gaagaacagcacctg

SEQ ID NO: 4860 - DNA, 15 bp, synthetic construct
  source 1..15: mol_type = other DNA
ggtcgtccagaaaat

SEQ ID NO: 4861 - DNA, 15 bp, synthetic construct
  source 1..15: mol_type = other DNA
ggccgcctacgaaca

SEQ ID NO: 4862 - DNA, 15 bp, synthetic construct
  source 1..15: mol_type = other DNA
catgcctttcaaatg

SEQ ID NO: 4863 - DNA, 15 bp, synthetic construct
  source 1..15: mol_type = other DNA
agaaaggagacttca

SEQ ID NO: 4864 - DNA, 15 bp, synthetic construct
  source 1..15: mol_type = other DNA
cacaggtggaagttc

SEQ ID NO: 4865 - DNA, 15 bp, synthetic construct
  source 1..15: mol_type = other DNA
caatggtgagcaatc

SEQ ID NO: 4866 - DNA, 15 bp, synthetic construct
  source 1..15: mol_type = other DNA
ttcttccgtcagctc

SEQ ID NO: 4867 - DNA, 15 bp, synthetic construct
  source 1..15: mol_type = other DNA
ggaaagcgagctcgc

SEQ ID NO: 4868 - DNA, 15 bp, synthetic construct
  source 1..15: mol_type = other DNA
accaaccaaaggatc

SEQ ID NO: 4869 - DNA, 15 bp, synthetic construct
  source 1..15: mol_type = other DNA
gatcccaaaggcaat

SEQ ID NO: 4870 - DNA, 15 bp, synthetic construct
  source 1..15: mol_type = other DNA
gtgtctaaaccgatc

SEQ ID NO: 4871 - DNA, 15 bp, synthetic construct
  source 1..15: mol_type = other DNA
gcagcagagatgatg

SEQ ID NO: 4872 - DNA, 15 bp, synthetic construct
  source 1..15: mol_type = other DNA
cgacaggaactgcag

SEQ ID NO: 4873 - DNA, 15 bp, synthetic construct
  source 1..15: mol_type = other DNA
tatgtcaggataggg

SEQ ID NO: 4874 - DNA, 15 bp, synthetic construct
  source 1..15: mol_type = other DNA
atgaatccaatctgc

SEQ ID NO: 4875 - DNA, 15 bp, synthetic construct
  source 1..15: mol_type = other DNA
aaccgagatccagcc

SEQ ID NO: 4876 - DNA, 15 bp, synthetic construct
  source 1..15: mol_type = other DNA
acgaggaatgtcaca

SEQ ID NO: 4877 - DNA, 15 bp, synthetic construct
  source 1..15: mol_type = other DNA
tagaaaataggactg

SEQ ID NO: 4878 - DNA, 15 bp, synthetic construct
  source 1..15: mol_type = other DNA
cttattgagcaagtc

SEQ ID NO: 4879 - DNA, 15 bp, synthetic construct
  source 1..15: mol_type = other DNA
tctagctgtatctct

SEQ ID NO: 4880 - DNA, 15 bp, synthetic construct
  source 1..15: mol_type = other DNA
ctaagcagccattcc

SEQ ID NO: 4881 - DNA, 15 bp, synthetic construct
  source 1..15: mol_type = other DNA
gccattccaagaagg

SEQ ID NO: 4882 - DNA, 15 bp, synthetic construct
  source 1..15: mol_type = other DNA
aaagatatagctcca

SEQ ID NO: 4883 - DNA, 15 bp, synthetic construct
  source 1..15: mol_type = other DNA
tgaccctcttgagat

SEQ ID NO: 4884 - DNA, 15 bp, synthetic construct
  source 1..15: mol_type = other DNA
agcacaccaaaggct

SEQ ID NO: 4885 - DNA, 15 bp, synthetic construct
  source 1..15: mol_type = other DNA
tgcagctgtactcgg

SEQ ID NO: 4886 - DNA, 15 bp, synthetic construct
  source 1..15: mol_type = other DNA
actcaccactggaaa

SEQ ID NO: 4887 - DNA, 15 bp, synthetic construct
  source 1..15: mol_type = other DNA
tgtaatcatacttgg

SEQ ID NO: 4888 - DNA, 15 bp, synthetic construct
  source 1..15: mol_type = other DNA
cccaacagaaaagat

SEQ ID NO: 4889 - DNA, 15 bp, synthetic construct
  source 1..15: mol_type = other DNA
gatgagcaggaagcg

SEQ ID NO: 4890 - DNA, 15 bp, synthetic construct
  source 1..15: mol_type = other DNA
gataccggagccaat

SEQ ID NO: 4891 - DNA, 15 bp, synthetic construct
  source 1..15: mol_type = other DNA
gctcgtggagtaata

SEQ ID NO: 4892 - DNA, 15 bp, synthetic construct
  source 1..15: mol_type = other DNA
gctcgctgttgctac

SEQ ID NO: 4893 - DNA, 15 bp, synthetic construct
  source 1..15: mol_type = other DNA
gcccagtttcgagaa

SEQ ID NO: 4894 - DNA, 15 bp, synthetic construct
  source 1..15: mol_type = other DNA
acatacatgggcacg

SEQ ID NO: 4895 - DNA, 15 bp, synthetic construct
  source 1..15: mol_type = other DNA
atgatgaagcggccc

SEQ ID NO: 4896 - DNA, 15 bp, synthetic construct
  source 1..15: mol_type = other DNA
gaactcctcgatcac

SEQ ID NO: 4897 - DNA, 15 bp, synthetic construct
  source 1..15: mol_type = other DNA
gcacgaagcctgtgg

SEQ ID NO: 4898 - DNA, 15 bp, synthetic construct
  source 1..15: mol_type = other DNA
ccgtcgtttggtctc

SEQ ID NO: 4899 - DNA, 15 bp, synthetic construct
  source 1..15: mol_type = other DNA
gatggtgagtgccct

SEQ ID NO: 4900 - DNA, 15 bp, synthetic construct
  source 1..15: mol_type = other DNA
ataagtgcatgcgcc

SEQ ID NO: 4901 - DNA, 15 bp, synthetic construct
  source 1..15: mol_type = other DNA
gctatgtgaccttgg

SEQ ID NO: 4902 - DNA, 15 bp, synthetic construct
  source 1..15: mol_type = other DNA
tagcatgggcgaagt

SEQ ID NO: 4903 - DNA, 15 bp, synthetic construct
  source 1..15: mol_type = other DNA
tgtctacggtgatct

SEQ ID NO: 4904 - DNA, 15 bp, synthetic construct
  source 1..15: mol_type = other DNA
gcatcatcagcatcc

SEQ ID NO: 4905 - DNA, 15 bp, synthetic construct
  source 1..15: mol_type = other DNA
caggaatatgaggat

SEQ ID NO: 4906 - DNA, 15 bp, synthetic construct
  source 1..15: mol_type = other DNA
atctttggtcctcag

SEQ ID NO: 4907 - DNA, 15 bp, synthetic construct
  source 1..15: mol_type = other DNA
ctccatcatgtcttc

SEQ ID NO: 4908 - DNA, 15 bp, synthetic construct
  source 1..15: mol_type = other DNA
ggcttgaacagaagc

SEQ ID NO: 4909 - DNA, 15 bp, synthetic construct
  source 1..15: mol_type = other DNA
ctaccctttgtggaa

SEQ ID NO: 4910 - DNA, 15 bp, synthetic construct
  source 1..15: mol_type = other DNA
cgctgagcgacgtga

SEQ ID NO: 4911 - DNA, 15 bp, synthetic construct
  source 1..15: mol_type = other DNA
tccttggaaggtggg

SEQ ID NO: 4912 - DNA, 15 bp, synthetic construct
  source 1..15: mol_type = other DNA
gctgctctttgacct

SEQ ID NO: 4913 - DNA, 15 bp, synthetic construct
  source 1..15: mol_type = other DNA
atgggaaactcggaa

SEQ ID NO: 4914 - DNA, 15 bp, synthetic construct
  source 1..15: mol_type = other DNA
tgtagaatcaactgt

SEQ ID NO: 4915 - DNA, 15 bp, synthetic construct
  source 1..15: mol_type = other DNA
caggtttgctgacaa

SEQ ID NO: 4916 - DNA, 15 bp, synthetic construct
  source 1..15: mol_type = other DNA
tacgcagctctagga

SEQ ID NO: 4917 - DNA, 15 bp, synthetic construct
  source 1..15: mol_type = other DNA
ggcctctgaatccgg

SEQ ID NO: 4918 - DNA, 15 bp, synthetic construct
  source 1..15: mol_type = other DNA
aggccttttcttgca

SEQ ID NO: 4919 - DNA, 15 bp, synthetic construct
  source 1..15: mol_type = other DNA
agataaggaggatcc

SEQ ID NO: 4920 - DNA, 15 bp, synthetic construct
  source 1..15: mol_type = other DNA
tgtctagcagttggt

SEQ ID NO: 4921 - DNA, 15 bp, synthetic construct
  source 1..15: mol_type = other DNA
tattcatcccgacct

SEQ ID NO: 4922 - DNA, 15 bp, synthetic construct
  source 1..15: mol_type = other DNA
aggacagagctcgga

SEQ ID NO: 4923 - DNA, 15 bp, synthetic construct
  source 1..15: mol_type = other DNA
ctttggtgtggctag

SEQ ID NO: 4924 - DNA, 15 bp, synthetic construct
  source 1..15: mol_type = other DNA
ataggtatgggtcaa

SEQ ID NO: 4925 - DNA, 15 bp, synthetic construct
  source 1..15: mol_type = other DNA
gcagacatttgggcg

SEQ ID NO: 4926 - DNA, 15 bp, synthetic construct
  source 1..15: mol_type = other DNA
tttggctgatacatc

SEQ ID NO: 4927 - DNA, 15 bp, synthetic construct
  source 1..15: mol_type = other DNA
gcatcgtagatgaag

SEQ ID NO: 4928 - DNA, 15 bp, synthetic construct
  source 1..15: mol_type = other DNA
ttggatgagtagagc

SEQ ID NO: 4929 - DNA, 15 bp, synthetic construct
  source 1..15: mol_type = other DNA
cgctgatgtgagtag

SEQ ID NO: 4930 - DNA, 15 bp, synthetic construct
  source 1..15: mol_type = other DNA
ggcgctcaaagacca

SEQ ID NO: 4931 - DNA, 15 bp, synthetic construct
  source 1..15: mol_type = other DNA
ggcaggtagtccagg

SEQ ID NO: 4932 - DNA, 15 bp, synthetic construct
  source 1..15: mol_type = other DNA
gctggtgttttgctg

SEQ ID NO: 4933 - DNA, 15 bp, synthetic construct
  source 1..15: mol_type = other DNA
actgaccactggaat

SEQ ID NO: 4934 - DNA, 15 bp, synthetic construct
  source 1..15: mol_type = other DNA
ttgaggatgactgct

SEQ ID NO: 4935 - DNA, 15 bp, synthetic construct
  source 1..15: mol_type = other DNA
tgtccatgtgagcca

SEQ ID NO: 4936 - DNA, 15 bp, synthetic construct
  source 1..15: mol_type = other DNA
agtgttctggctcca

SEQ ID NO: 4937 - DNA, 15 bp, synthetic construct
  source 1..15: mol_type = other DNA
tggtgagaagaccct

SEQ ID NO: 4938 - DNA, 15 bp, synthetic construct
  source 1..15: mol_type = other DNA
aacaaaggctcccag

SEQ ID NO: 4939 - DNA, 15 bp, synthetic construct
  source 1..15: mol_type = other DNA
ttcctcagtgaagcg

SEQ ID NO: 4940 - DNA, 15 bp, synthetic construct
  source 1..15: mol_type = other DNA
ctgagccctttgcgc

SEQ ID NO: 4941 - DNA, 15 bp, synthetic construct
  source 1..15: mol_type = other DNA
tccagctgttagtcc

SEQ ID NO: 4942 - DNA, 15 bp, synthetic construct
  source 1..15: mol_type = other DNA
tcaccacctctgcgg

SEQ ID NO: 4943 - DNA, 15 bp, synthetic construct
  source 1..15: mol_type = other DNA
agcgaacacaacaca

SEQ ID NO: 4944 - DNA, 15 bp, synthetic construct
  source 1..15: mol_type = other DNA
tggcttccagtatgc

SEQ ID NO: 4945 - DNA, 15 bp, synthetic construct
  source 1..15: mol_type = other DNA
agaaactgcactctt

SEQ ID NO: 4946 - DNA, 15 bp, synthetic construct
  source 1..15: mol_type = other DNA
ggaagaaggtcttgt

SEQ ID NO: 4947 - DNA, 15 bp, synthetic construct
  source 1..15: mol_type = other DNA
tcagaatcctagcca

SEQ ID NO: 4948 - DNA, 15 bp, synthetic construct
  source 1..15: mol_type = other DNA
tcacagaatctttca

SEQ ID NO: 4949 - DNA, 15 bp, synthetic construct
  source 1..15: mol_type = other DNA
ccaacttggtgtgct

SEQ ID NO: 4950 - DNA, 15 bp, synthetic construct
  source 1..15: mol_type = other DNA
gggacgaaggcaaac

SEQ ID NO: 4951 - DNA, 15 bp, synthetic construct
  source 1..15: mol_type = other DNA
ttaaaatgttgccag

SEQ ID NO: 4952 - DNA, 15 bp, synthetic construct
  source 1..15: mol_type = other DNA
aggcaccacataaac

SEQ ID NO: 4953 - DNA, 15 bp, synthetic construct
  source 1..15: mol_type = other DNA
ctgaagacaggttgg

SEQ ID NO: 4954 - DNA, 15 bp, synthetic construct
  source 1..15: mol_type = other DNA
atcagctatgataga

SEQ ID NO: 4955 - DNA, 15 bp, synthetic construct
  source 1..15: mol_type = other DNA
ctcttgtagacatac

SEQ ID NO: 4956 - DNA, 15 bp, synthetic construct
  source 1..15: mol_type = other DNA
ccttcatgttcaata

SEQ ID NO: 4957 - DNA, 15 bp, synthetic construct
  source 1..15: mol_type = other DNA
caggagatatgacag

SEQ ID NO: 4958 - DNA, 15 bp, synthetic construct
  source 1..15: mol_type = other DNA
gtcacaggttcctca

SEQ ID NO: 4959 - DNA, 15 bp, synthetic construct
  source 1..15: mol_type = other DNA
ttggtagttagctaa

SEQ ID NO: 4960 - DNA, 15 bp, synthetic construct
  source 1..15: mol_type = other DNA
gttgacctcgtgcat

SEQ ID NO: 4961 - DNA, 15 bp, synthetic construct
  source 1..15: mol_type = other DNA
aggccaatcatgagg

SEQ ID NO: 4962 - DNA, 15 bp, synthetic construct
  source 1..15: mol_type = other DNA
tcgaaacaggagggc

SEQ ID NO: 4963 - DNA, 15 bp, synthetic construct
  source 1..15: mol_type = other DNA
ggctgcttgtcatca

SEQ ID NO: 4964 - DNA, 15 bp, synthetic construct
  source 1..15: mol_type = other DNA
aaagacttaatcgcc

SEQ ID NO: 4965 - DNA, 15 bp, synthetic construct
  source 1..15: mol_type = other DNA
tgaattcctttacac

SEQ ID NO: 4966 - DNA, 15 bp, synthetic construct
  source 1..15: mol_type = other DNA
agcttagcactctgt

SEQ ID NO: 4967 - DNA, 15 bp, synthetic construct
  source 1..15: mol_type = other DNA
gtgactctggtagtt

SEQ ID NO: 4968 - DNA, 15 bp, synthetic construct
  source 1..15: mol_type = other DNA
cagcattcacaccaa

SEQ ID NO: 4969 - DNA, 15 bp, synthetic construct
  source 1..15: mol_type = other DNA
ccagttctccgctca

SEQ ID NO: 4970 - DNA, 15 bp, synthetic construct
  source 1..15: mol_type = other DNA
gtgaatatgagacaa

SEQ ID NO: 4971 - DNA, 15 bp, synthetic construct
  source 1..15: mol_type = other DNA
aaaacacacttctgg

SEQ ID NO: 4972 - DNA, 15 bp, synthetic construct
  source 1..15: mol_type = other DNA
aaacctaggactgga

SEQ ID NO: 4973 - DNA, 15 bp, synthetic construct
  source 1..15: mol_type = other DNA
tctaatccatccaac

SEQ ID NO: 4974 - DNA, 15 bp, synthetic construct
  source 1..15: mol_type = other DNA
gctgctgcaatgctc

SEQ ID NO: 4975 - DNA, 15 bp, synthetic construct
  source 1..15: mol_type = other DNA
tgcagagattctgaa

SEQ ID NO: 4976 - DNA, 15 bp, synthetic construct
  source 1..15: mol_type = other DNA
tgtagggttaatgtt

SEQ ID NO: 4977 - DNA, 15 bp, synthetic construct
  source 1..15: mol_type = other DNA
tttgtctttcctgct

SEQ ID NO: 4978 - DNA, 15 bp, synthetic construct
  source 1..15: mol_type = other DNA
ttctaaccttcctga

SEQ ID NO: 4979 - DNA, 15 bp, synthetic construct
  source 1..15: mol_type = other DNA
tgcactctgaactgt

SEQ ID NO: 4980 - DNA, 15 bp, synthetic construct
  source 1..15: mol_type = other DNA
gaggctgaataactt

SEQ ID NO: 4981 - DNA, 15 bp, synthetic construct
  source 1..15: mol_type = other DNA
atggctctctaagga

SEQ ID NO: 4982 - DNA, 15 bp, synthetic construct
  source 1..15: mol_type = other DNA
aggcatatcttccag

SEQ ID NO: 4983 - DNA, 15 bp, synthetic construct
  source 1..15: mol_type = other DNA
tcagcgcttctgccc

SEQ ID NO: 4984 - DNA, 15 bp, synthetic construct
  source 1..15: mol_type = other DNA
agatgaggaaacatg

SEQ ID NO: 4985 - DNA, 15 bp, synthetic construct
  source 1..15: mol_type = other DNA
gaacccacttttttt

SEQ ID NO: 4986 - DNA, 15 bp, synthetic construct
  source 1..15: mol_type = other DNA
tctagttctgtcctc

SEQ ID NO: 4987 - DNA, 15 bp, synthetic construct
  source 1..15: mol_type = other DNA
atagaccactctaca

SEQ ID NO: 4988 - DNA, 15 bp, synthetic construct
  source 1..15: mol_type = other DNA
gtcactcattcctcc

SEQ ID NO: 4989 - DNA, 15 bp, synthetic construct
  source 1..15: mol_type = other DNA
tcatccacgctggcc

SEQ ID NO: 4990 - DNA, 15 bp, synthetic construct
  source 1..15: mol_type = other DNA
acaacattctccttg

SEQ ID NO: 4991 - DNA, 15 bp, synthetic construct
  source 1..15: mol_type = other DNA
ggtcagaaggaccag

SEQ ID NO: 4992 - DNA, 15 bp, synthetic construct
  source 1..15: mol_type = other DNA
cccactgatgacact

SEQ ID NO: 4993 - DNA, 15 bp, synthetic construct
  source 1..15: mol_type = other DNA
tggaaaaccgtgtcc

SEQ ID NO: 4994 - DNA, 15 bp, synthetic construct
  source 1..15: mol_type = other DNA
gtcgatgtgaggctt

SEQ ID NO: 4995 - DNA, 15 bp, synthetic construct
  source 1..15: mol_type = other DNA
caaagaatgaggtta

SEQ ID NO: 4996 - DNA, 15 bp, synthetic construct
  source 1..15: mol_type = other DNA
gcctgaatccttacc

SEQ ID NO: 4997 - DNA, 15 bp, synthetic construct
  source 1..15: mol_type = other DNA
aggtcaggattctag

SEQ ID NO: 4998 - DNA, 15 bp, synthetic construct
  source 1..15: mol_type = other DNA
gaggttgtagtggag

SEQ ID NO: 4999 - DNA, 15 bp, synthetic construct
  source 1..15: mol_type = other DNA
ggcgcttgtcacttt

SEQ ID NO: 5000 - DNA, 15 bp, synthetic construct
  source 1..15: mol_type = other DNA
gggctagagtggcta

SEQ ID NO: 5001 - DNA, 15 bp, synthetic construct
  source 1..15: mol_type = other DNA
aataacaggagacag

SEQ ID NO: 5002 - DNA, 15 bp, synthetic construct
  source 1..15: mol_type = other DNA
gcggagtgtccactg

SEQ ID NO: 5003 - DNA, 15 bp, synthetic construct
  source 1..15: mol_type = other DNA
gggcattgaagggat

SEQ ID NO: 5004 - DNA, 15 bp, synthetic construct
  source 1..15: mol_type = other DNA
agtcaacctccttct

SEQ ID NO: 5005 - DNA, 15 bp, synthetic construct
  source 1..15: mol_type = other DNA
ctcgtggctgatctc

SEQ ID NO: 5006 - DNA, 15 bp, synthetic construct
  source 1..15: mol_type = other DNA
cggaacctttaattt

SEQ ID NO: 5007 - DNA, 15 bp, synthetic construct
  source 1..15: mol_type = other DNA
gggcagatatagcta

SEQ ID NO: 5008 - DNA, 15 bp, synthetic construct
  source 1..15: mol_type = other DNA
taggagtggtaaggc

SEQ ID NO: 5009 - DNA, 15 bp, synthetic construct
  source 1..15: mol_type = other DNA
cctcactatctgtga

SEQ ID NO: 5010 - DNA, 15 bp, synthetic construct
  source 1..15: mol_type = other DNA
gtggtgagaccgtgg

SEQ ID NO: 5011 - DNA, 15 bp, synthetic construct
  source 1..15: mol_type = other DNA
gtttagccatgtggc

SEQ ID NO: 5012 - DNA, 15 bp, synthetic construct
  source 1..15: mol_type = other DNA
gcaaatcactgcaat

SEQ ID NO: 5013 - DNA, 15 bp, synthetic construct
  source 1..15: mol_type = other DNA
atggtgagactcatc

SEQ ID NO: 5014 - DNA, 15 bp, synthetic construct
  source 1..15: mol_type = other DNA
cactatcacctcggc

SEQ ID NO: 5015 - DNA, 15 bp, synthetic construct
  source 1..15: mol_type = other DNA
cccagaatttaaatg

SEQ ID NO: 5016 - DNA, 15 bp, synthetic construct
  source 1..15: mol_type = other DNA
gtcaatggagtcctg

SEQ ID NO: 5017 - DNA, 15 bp, synthetic construct
  source 1..15: mol_type = other DNA
acctcgctcctaaag

SEQ ID NO: 5018 - DNA, 15 bp, synthetic construct
  source 1..15: mol_type = other DNA
gggcatcattctccg

SEQ ID NO: 5019 - DNA, 15 bp, synthetic construct
  source 1..15: mol_type = other DNA
agcagatctctgcag

SEQ ID NO: 5020 - DNA, 15 bp, synthetic construct
  source 1..15: mol_type = other DNA
ccagctttgcgttct

SEQ ID NO: 5021 - DNA, 15 bp, synthetic construct
  source 1..15: mol_type = other DNA
tatggacaatactag

SEQ ID NO: 5022 - DNA, 15 bp, synthetic construct
  source 1..15: mol_type = other DNA
cttggaggattaggg

SEQ ID NO: 5023 - DNA, 15 bp, synthetic construct
  source 1..15: mol_type = other DNA
tttgcatttgaagtc

SEQ ID NO: 5024 - DNA, 15 bp, synthetic construct
  source 1..15: mol_type = other DNA
tttctgactttactg

SEQ ID NO: 5025 - DNA, 15 bp, synthetic construct
  source 1..15: mol_type = other DNA
gttcagtgacattca

SEQ ID NO: 5026 - DNA, 15 bp, synthetic construct
  source 1..15: mol_type = other DNA
ttccagaattttcct

SEQ ID NO: 5027 - DNA, 15 bp, synthetic construct
  source 1..15: mol_type = other DNA
gattgggtcttcctg

SEQ ID NO: 5028 - DNA, 15 bp, synthetic construct
  source 1..15: mol_type = other DNA
ctctccgcaactata

SEQ ID NO: 5029 - DNA, 15 bp, synthetic construct
  source 1..15: mol_type = other DNA
tcattggcagcgtgc

SEQ ID NO: 5030 - DNA, 15 bp, synthetic construct
  source 1..15: mol_type = other DNA
actctttgccacacc

SEQ ID NO: 5031 - DNA, 15 bp, synthetic construct
  source 1..15: mol_type = other DNA
ccaggtactgtctga

SEQ ID NO: 5032 - DNA, 15 bp, synthetic construct
  source 1..15: mol_type = other DNA
tgaagttcgtaccac

SEQ ID NO: 5033 - DNA, 15 bp, synthetic construct
  source 1..15: mol_type = other DNA
acatcactgtgctct

SEQ ID NO: 5034 - DNA, 15 bp, synthetic construct
  source 1..15: mol_type = other DNA
ccctgtcttcaagac

SEQ ID NO: 5035 - DNA, 15 bp, synthetic construct
  source 1..15: mol_type = other DNA
atcatccagctgtga

SEQ ID NO: 5036 - DNA, 15 bp, synthetic construct
  source 1..15: mol_type = other DNA
tggtgaacctgctcc

SEQ ID NO: 5037 - DNA, 15 bp, synthetic construct
  source 1..15: mol_type = other DNA
gtcccataacacttg

SEQ ID NO: 5038 - DNA, 15 bp, synthetic construct
  source 1..15: mol_type = other DNA
gtgtatttctgttcc

SEQ ID NO: 5039 - DNA, 15 bp, synthetic construct
  source 1..15: mol_type = other DNA
catgttgtaccacag

SEQ ID NO: 5040 - DNA, 15 bp, synthetic construct
  source 1..15: mol_type = other DNA
tccttctttgctgct

SEQ ID NO: 5041 - DNA, 15 bp, synthetic construct
  source 1..15: mol_type = other DNA
gctggtcaatctctc

SEQ ID NO: 5042 - DNA, 15 bp, synthetic construct
  source 1..15: mol_type = other DNA
tcctgaaggtgctgc

SEQ ID NO: 5043 - DNA, 15 bp, synthetic construct
  source 1..15: mol_type = other DNA
cggactggatctggg

SEQ ID NO: 5044 - DNA, 15 bp, synthetic construct
  source 1..15: mol_type = other DNA
gtgagcatctgttcc

SEQ ID NO: 5045 - DNA, 15 bp, synthetic construct
  source 1..15: mol_type = other DNA
ctcggtctcaaaggt

SEQ ID NO: 5046 - DNA, 15 bp, synthetic construct
  source 1..15: mol_type = other DNA
tactccatcgctgac

SEQ ID NO: 5047 - DNA, 15 bp, synthetic construct
  source 1..15: mol_type = other DNA
gattctgctaatgac

SEQ ID NO: 5048 - DNA, 15 bp, synthetic construct
  source 1..15: mol_type = other DNA
tttgctgcaactcct

SEQ ID NO: 5049 - DNA, 15 bp, synthetic construct
  source 1..15: mol_type = other DNA
caggatgtacttttt

SEQ ID NO: 5050 - DNA, 15 bp, synthetic construct
  source 1..15: mol_type = other DNA
ctaggcagatgttgg

SEQ ID NO: 5051 - DNA, 15 bp, synthetic construct
  source 1..15: mol_type = other DNA
ccacgattctctcct

SEQ ID NO: 5052 - DNA, 15 bp, synthetic construct
  source 1..15: mol_type = other DNA
gctgaattacagccc

SEQ ID NO: 5053 - DNA, 15 bp, synthetic construct
  source 1..15: mol_type = other DNA
ggacgccggtcttga

SEQ ID NO: 5054 - DNA, 15 bp, synthetic construct
  source 1..15: mol_type = other DNA
caggaaggtgcctgg

SEQ ID NO: 5055 - DNA, 15 bp, synthetic construct
  source 1..15: mol_type = other DNA
gggccatcctgctaa

SEQ ID NO: 5056 - DNA, 15 bp, synthetic construct
  source 1..15: mol_type = other DNA
atcctggagattctc

SEQ ID NO: 5057 - DNA, 15 bp, synthetic construct
  source 1..15: mol_type = other DNA
gttaaatttccggga

SEQ ID NO: 5058 - DNA, 15 bp, synthetic construct
  source 1..15: mol_type = other DNA
tgttggagatcacca

SEQ ID NO: 5059 - DNA, 15 bp, synthetic construct
  source 1..15: mol_type = other DNA
tcccacacaagagaa

SEQ ID NO: 5060 - DNA, 15 bp, synthetic construct
  source 1..15: mol_type = other DNA
atttccaaactgcat

SEQ ID NO: 5061 - DNA, 15 bp, synthetic construct
  source 1..15: mol_type = other DNA
tgtttccattcagat

SEQ ID NO: 5062 - DNA, 15 bp, synthetic construct
  source 1..15: mol_type = other DNA
cagtgtagtcagctg

SEQ ID NO: 5063 - DNA, 15 bp, synthetic construct
  source 1..15: mol_type = other DNA
gaatttccatgggaa

SEQ ID NO: 5064 - DNA, 15 bp, synthetic construct
  source 1..15: mol_type = other DNA
ttgtaccaaatgatg

SEQ ID NO: 5065 - DNA, 15 bp, synthetic construct
  source 1..15: mol_type = other DNA
tacgatgaaaactgc

SEQ ID NO: 5066 - DNA, 15 bp, synthetic construct
  source 1..15: mol_type = other DNA
cgcttccagtcttgc

SEQ ID NO: 5067 - DNA, 15 bp, synthetic construct
  source 1..15: mol_type = other DNA
ccctttctgttggtc

SEQ ID NO: 5068 - DNA, 15 bp, synthetic construct
  source 1..15: mol_type = other DNA
ggatttgcatttctc

SEQ ID NO: 5069 - DNA, 15 bp, synthetic construct
  source 1..15: mol_type = other DNA
tcaccttcatatgtc

SEQ ID NO: 5070 - DNA, 15 bp, synthetic construct
  source 1..15: mol_type = other DNA
agccactttgtgctc

SEQ ID NO: 5071 - DNA, 15 bp, synthetic construct
  source 1..15: mol_type = other DNA
aggtctgtctcatgg

SEQ ID NO: 5072 - DNA, 15 bp, synthetic construct
  source 1..15: mol_type = other DNA
ctgtcgctcaaccac

SEQ ID NO: 5073 - DNA, 15 bp, synthetic construct
  source 1..15: mol_type = other DNA
ttcagatgtcaaaca

SEQ ID NO: 5074 - DNA, 15 bp, synthetic construct
  source 1..15: mol_type = other DNA
caattgaggagtgcc

SEQ ID NO: 5075 - DNA, 15 bp, synthetic construct
  source 1..15: mol_type = other DNA
aagtaccaacggcct

SEQ ID NO: 5076 - DNA, 15 bp, synthetic construct
  source 1..15: mol_type = other DNA
atttctctagaggcc

SEQ ID NO: 5077 - DNA, 15 bp, synthetic construct
  source 1..15: mol_type = other DNA
tagcaacagccgttc

SEQ ID NO: 5078 - DNA, 15 bp, synthetic construct
  source 1..15: mol_type = other DNA
tgtagtctcgcagga

SEQ ID NO: 5079 - DNA, 15 bp, synthetic construct
  source 1..15: mol_type = other DNA
tgatggagaatgtgg

SEQ ID NO: 5080 - DNA, 15 bp, synthetic construct
  source 1..15: mol_type = other DNA
tactgagagactccc

SEQ ID NO: 5081 - DNA, 15 bp, synthetic construct
  source 1..15: mol_type = other DNA
tcaagccatgtccaa

SEQ ID NO: 5082 - DNA, 15 bp, synthetic construct
  source 1..15: mol_type = other DNA
ttcagtcaccatgtg

SEQ ID NO: 5083 - DNA, 15 bp, synthetic construct
  source 1..15: mol_type = other DNA
tagtttctccaattg

SEQ ID NO: 5084 - DNA, 15 bp, synthetic construct
  source 1..15: mol_type = other DNA
aacttcctgattcac

SEQ ID NO: 5085 - DNA, 15 bp, synthetic construct
  source 1..15: mol_type = other DNA
caaagtcagaagcgc

SEQ ID NO: 5086 - DNA, 15 bp, synthetic construct
  source 1..15: mol_type = other DNA
aataaggagacttca

SEQ ID NO: 5087 - DNA, 15 bp, synthetic construct
  source 1..15: mol_type = other DNA
gccatcaggcatgaa

SEQ ID NO: 5088 - DNA, 15 bp, synthetic construct
  source 1..15: mol_type = other DNA
tttaagctctctttg

SEQ ID NO: 5089 - DNA, 15 bp, synthetic construct
  source 1..15: mol_type = other DNA
tgaaagcttaggtga

SEQ ID NO: 5090 - DNA, 15 bp, synthetic construct
  source 1..15: mol_type = other DNA
acgcttagaggctgt

SEQ ID NO: 5091 - DNA, 15 bp, synthetic construct
  source 1..15: mol_type = other DNA
ggatttacagatgtc

SEQ ID NO: 5092 - DNA, 15 bp, synthetic construct
  source 1..15: mol_type = other DNA
agcactgatcaccag

SEQ ID NO: 5093 - DNA, 15 bp, synthetic construct
  source 1..15: mol_type = other DNA
aggtggagttttcca

SEQ ID NO: 5094 - DNA, 15 bp, synthetic construct
  source 1..15: mol_type = other DNA
tacaatggctggaga

SEQ ID NO: 5095 - DNA, 15 bp, synthetic construct
  source 1..15: mol_type = other DNA
tggagcattctctga

SEQ ID NO: 5096 - DNA, 15 bp, synthetic construct
  source 1..15: mol_type = other DNA
aggctaggcttatgc

SEQ ID NO: 5097 - DNA, 15 bp, synthetic construct
  source 1..15: mol_type = other DNA
tcctttggaaagtgg

SEQ ID NO: 5098 - DNA, 15 bp, synthetic construct
  source 1..15: mol_type = other DNA
tctggcttttgcaaa

SEQ ID NO: 5099 - DNA, 15 bp, synthetic construct
  source 1..15: mol_type = other DNA
tgcctaaggctattg

SEQ ID NO: 5100 - DNA, 15 bp, synthetic construct
  source 1..15: mol_type = other DNA
ttgaggcaacgaacc

SEQ ID NO: 5101 - DNA, 15 bp, synthetic construct
  source 1..15: mol_type = other DNA
tggtcgccatcttgt

SEQ ID NO: 5102 - DNA, 15 bp, synthetic construct
  source 1..15: mol_type = other DNA
gttggtgggaatgct

SEQ ID NO: 5103 - DNA, 15 bp, synthetic construct
  source 1..15: mol_type = other DNA
agcttgctgtagcac

SEQ ID NO: 5104 - DNA, 15 bp, synthetic construct
  source 1..15: mol_type = other DNA
tgccaacattcaagc

SEQ ID NO: 5105 - DNA, 15 bp, synthetic construct
  source 1..15: mol_type = other DNA
ttcccaggaaaagaa

SEQ ID NO: 5106 - DNA, 15 bp, synthetic construct
  source 1..15: mol_type = other DNA
gatttggtcaaatct

SEQ ID NO: 5107 - DNA, 15 bp, synthetic construct
  source 1..15: mol_type = other DNA
gaccttggaggtgac

SEQ ID NO: 5108 - DNA, 15 bp, synthetic construct
  source 1..15: mol_type = other DNA
ccactcgggatttcc

SEQ ID NO: 5109 - DNA, 15 bp, synthetic construct
  source 1..15: mol_type = other DNA
acttgtcgcattggg

SEQ ID NO: 5110 - DNA, 15 bp, synthetic construct
  source 1..15: mol_type = other DNA
ttctacctaagcgag

SEQ ID NO: 5111 - DNA, 15 bp, synthetic construct
  source 1..15: mol_type = other DNA
gtgcccatcattctt

SEQ ID NO: 5112 - DNA, 15 bp, synthetic construct
  source 1..15: mol_type = other DNA
gaacatgtcagtctt

SEQ ID NO: 5113 - DNA, 15 bp, synthetic construct
  source 1..15: mol_type = other DNA
cttcgcggctcatgc

SEQ ID NO: 5114 - DNA, 15 bp, synthetic construct
  source 1..15: mol_type = other DNA
gcctgatcagaaacc

SEQ ID NO: 5115 - DNA, 15 bp, synthetic construct
  source 1..15: mol_type = other DNA
caccaaagcccaaga

SEQ ID NO: 5116 - DNA, 15 bp, synthetic construct
  source 1..15: mol_type = other DNA
ccactcgcaatctct

SEQ ID NO: 5117 - DNA, 15 bp, synthetic construct
  source 1..15: mol_type = other DNA
acggtttccggatca

SEQ ID NO: 5118 - DNA, 15 bp, synthetic construct
  source 1..15: mol_type = other DNA
ccactgcttacagcc

SEQ ID NO: 5119 - DNA, 15 bp, synthetic construct
  source 1..15: mol_type = other DNA
ctgtggctcttgtcc

SEQ ID NO: 5120 - DNA, 15 bp, synthetic construct
  source 1..15: mol_type = other DNA
taggcatggccgaca

SEQ ID NO: 5121 - DNA, 15 bp, synthetic construct
  source 1..15: mol_type = other DNA
agccaaccgttgccc

SEQ ID NO: 5122 - DNA, 15 bp, synthetic construct
  source 1..15: mol_type = other DNA
gtaggcaaaggagac

SEQ ID NO: 5123 - DNA, 15 bp, synthetic construct
  source 1..15: mol_type = other DNA
caaggacaccaacgt

SEQ ID NO: 5124 - DNA, 15 bp, synthetic construct
  source 1..15: mol_type = other DNA
cggtagggtgacttc

SEQ ID NO: 5125 - DNA, 15 bp, synthetic construct
  source 1..15: mol_type = other DNA
cccagactttactgc

SEQ ID NO: 5126 - DNA, 15 bp, synthetic construct
  source 1..15: mol_type = other DNA
ccgcaaaccctttgt

SEQ ID NO: 5127 - DNA, 15 bp, synthetic construct
  source 1..15: mol_type = other DNA
tcacccacgaactcc

SEQ ID NO: 5128 - DNA, 15 bp, synthetic construct
  source 1..15: mol_type = other DNA
gccagcatatgcctt

SEQ ID NO: 5129 - DNA, 15 bp, synthetic construct
  source 1..15: mol_type = other DNA
ggacgtgtcctctgt

SEQ ID NO: 5130 - DNA, 15 bp, synthetic construct
  source 1..15: mol_type = other DNA
cctccaagtgtaagg

SEQ ID NO: 5131 - DNA, 15 bp, synthetic construct
  source 1..15: mol_type = other DNA
ataagctcagattct

SEQ ID NO: 5132 - DNA, 15 bp, synthetic construct
  source 1..15: mol_type = other DNA
ggaatggccatctcc

SEQ ID NO: 5133 - DNA, 15 bp, synthetic construct
  source 1..15: mol_type = other DNA
tagcagtactgtccc

SEQ ID NO: 5134 - DNA, 15 bp, synthetic construct
  source 1..15: mol_type = other DNA
caggaacaggctgat

SEQ ID NO: 5135 - DNA, 15 bp, synthetic construct
  source 1..15: mol_type = other DNA
aaaaactccgtctcc

SEQ ID NO: 5136 - DNA, 15 bp, synthetic construct
  source 1..15: mol_type = other DNA
agagattcccgcacc

SEQ ID NO: 5137 - DNA, 15 bp, synthetic construct
  source 1..15: mol_type = other DNA
agccatcttgtagaa

SEQ ID NO: 5138 - DNA, 15 bp, synthetic construct
  source 1..15: mol_type = other DNA
atattttctctgagg

SEQ ID NO: 5139 - DNA, 15 bp, synthetic construct
  source 1..15: mol_type = other DNA
agcagcatacctgaa

SEQ ID NO: 5140 - DNA, 15 bp, synthetic construct
  source 1..15: mol_type = other DNA
ggatgtggtcagcct

SEQ ID NO: 5141 - DNA, 15 bp, synthetic construct
  source 1..15: mol_type = other DNA
cacgctctcctggta

SEQ ID NO: 5142 - DNA, 15 bp, synthetic construct
  source 1..15: mol_type = other DNA
tcctcacagaaccgg

SEQ ID NO: 5143 - DNA, 15 bp, synthetic construct
  source 1..15: mol_type = other DNA
gttgtttctgtcccg

SEQ ID NO: 5144 - DNA, 15 bp, synthetic construct
  source 1..15: mol_type = other DNA
cttggaatttcacaa

SEQ ID NO: 5145 - DNA, 15 bp, synthetic construct
  source 1..15: mol_type = other DNA
gaatagtgagggatt

SEQ ID NO: 5146 - DNA, 15 bp, synthetic construct
  source 1..15: mol_type = other DNA
ctcagccgtgagttc

SEQ ID NO: 5147 - DNA, 15 bp, synthetic construct
  source 1..15: mol_type = other DNA
ccacgggaattccag

SEQ ID NO: 5148 - DNA, 15 bp, synthetic construct
  source 1..15: mol_type = other DNA
gcgagtcgagcagaa

SEQ ID NO: 5149 - DNA, 15 bp, synthetic construct
  source 1..15: mol_type = other DNA
tccgctgctattgtg

SEQ ID NO: 5150 - DNA, 15 bp, synthetic construct
  source 1..15: mol_type = other DNA
gataagtggagtcag

SEQ ID NO: 5151 - DNA, 15 bp, synthetic construct
  source 1..15: mol_type = other DNA
ggcactagtagcctc

SEQ ID NO: 5152 - DNA, 15 bp, synthetic construct
  source 1..15: mol_type = other DNA
tgaagccatacagcc

SEQ ID NO: 5153 - DNA, 15 bp, synthetic construct
  source 1..15: mol_type = other DNA
tgtgagatgggcttt

SEQ ID NO: 5154 - DNA, 15 bp, synthetic construct
  source 1..15: mol_type = other DNA
ggtaaacgtcagccc

SEQ ID NO: 5155 - DNA, 15 bp, synthetic construct
  source 1..15: mol_type = other DNA
ttggcatttaaagga

SEQ ID NO: 5156 - DNA, 15 bp, synthetic construct
  source 1..15: mol_type = other DNA
tttcatgtcagtttc

SEQ ID NO: 5157 - DNA, 15 bp, synthetic construct
  source 1..15: mol_type = other DNA
atcttcgcagctctg

SEQ ID NO: 5158 - DNA, 15 bp, synthetic construct
  source 1..15: mol_type = other DNA
ccctccaacggcttc

SEQ ID NO: 5159 - DNA, 15 bp, synthetic construct
  source 1..15: mol_type = other DNA
cggcaacgaggagag

SEQ ID NO: 5160 - DNA, 15 bp, synthetic construct
  source 1..15: mol_type = other DNA
gattagtgacatctg

SEQ ID NO: 5161 - DNA, 15 bp, synthetic construct
  source 1..15: mol_type = other DNA
cgagacatggtgtag

SEQ ID NO: 5162 - DNA, 15 bp, synthetic construct
  source 1..15: mol_type = other DNA
aaaccttctctgcag

SEQ ID NO: 5163 - DNA, 15 bp, synthetic construct
  source 1..15: mol_type = other DNA
acagacttcatgctc

SEQ ID NO: 5164 - DNA, 15 bp, synthetic construct
  source 1..15: mol_type = other DNA
tctctggtgatggga

SEQ ID NO: 5165 - DNA, 15 bp, synthetic construct
  source 1..15: mol_type = other DNA
cctggcgcatccagt

SEQ ID NO: 5166 - DNA, 15 bp, synthetic construct
  source 1..15: mol_type = other DNA
aacatcctgtagtgg

SEQ ID NO: 5167 - DNA, 15 bp, synthetic construct
  source 1..15: mol_type = other DNA
gccagtggtgctggt

SEQ ID NO: 5168 - DNA, 15 bp, synthetic construct
  source 1..15: mol_type = other DNA
ccaaaatccttcttg

SEQ ID NO: 5169 - DNA, 15 bp, synthetic construct
  source 1..15: mol_type = other DNA
atgacaggaatggga

SEQ ID NO: 5170 - DNA, 15 bp, synthetic construct
  source 1..15: mol_type = other DNA
gcgcgaccctcagtt

SEQ ID NO: 5171 - DNA, 15 bp, synthetic construct
  source 1..15: mol_type = other DNA
ctggagcacaatcat

SEQ ID NO: 5172 - DNA, 15 bp, synthetic construct
  source 1..15: mol_type = other DNA
aataaatagcctccc

SEQ ID NO: 5173 - DNA, 15 bp, synthetic construct
  source 1..15: mol_type = other DNA
cggaatcctttggca

SEQ ID NO: 5174 - DNA, 15 bp, synthetic construct
  source 1..15: mol_type = other DNA
tgttggaagcgttgc

SEQ ID NO: 5175 - DNA, 15 bp, synthetic construct
  source 1..15: mol_type = other DNA
tcatagctgtggtcc

SEQ ID NO: 5176 - DNA, 15 bp, synthetic construct
  source 1..15: mol_type = other DNA
aggtgagtcctttcc

SEQ ID NO: 5177 - DNA, 15 bp, synthetic construct
  source 1..15: mol_type = other DNA
cccttgttgtttgtg

SEQ ID NO: 5178 - DNA, 15 bp, synthetic construct
  source 1..15: mol_type = other DNA
aaaaagctccttcat

SEQ ID NO: 5179 - DNA, 15 bp, synthetic construct
  source 1..15: mol_type = other DNA
ctgctcagttgggaa

SEQ ID NO: 5180 - DNA, 15 bp, synthetic construct
  source 1..15: mol_type = other DNA
cccactgtgtttgag

SEQ ID NO: 5181 - DNA, 15 bp, synthetic construct
  source 1..15: mol_type = other DNA
tcaacgatatgcagc

SEQ ID NO: 5182 - DNA, 15 bp, synthetic construct
  source 1..15: mol_type = other DNA
gattaaacttggacc

SEQ ID NO: 5183 - DNA, 15 bp, synthetic construct
  source 1..15: mol_type = other DNA
acacatgccaacgaa

SEQ ID NO: 5184 - DNA, 15 bp, synthetic construct
  source 1..15: mol_type = other DNA
ccaaggaattgacag

SEQ ID NO: 5185 - DNA, 15 bp, synthetic construct
  source 1..15: mol_type = other DNA
agtcggtgtcctcca

SEQ ID NO: 5186 - DNA, 15 bp, synthetic construct
  source 1..15: mol_type = other DNA
tgtagttagggcaga

SEQ ID NO: 5187 - DNA, 15 bp, synthetic construct
  source 1..15: mol_type = other DNA
acatacgtgtatttg

SEQ ID NO: 5188 - DNA, 15 bp, synthetic construct
  source 1..15: mol_type = other DNA
ggttgggtaggagag

SEQ ID NO: 5189 - DNA, 15 bp, synthetic construct
  source 1..15: mol_type = other DNA
cccgtaactgtaacc

SEQ ID NO: 5190 - DNA, 15 bp, synthetic construct
  source 1..15: mol_type = other DNA
agtcaaggatagaag

SEQ ID NO: 5191 - DNA, 15 bp, synthetic construct
  source 1..15: mol_type = other DNA
gggctgcctacaaag

SEQ ID NO: 5192 - DNA, 15 bp, synthetic construct
  source 1..15: mol_type = other DNA
cagcgtttgcaggcg

SEQ ID NO: 5193 - DNA, 15 bp, synthetic construct
  source 1..15: mol_type = other DNA
tacacgaacttctcc

SEQ ID NO: 5194 - DNA, 15 bp, synthetic construct
  source 1..15: mol_type = other DNA
ctgtgttctcacaag

SEQ ID NO: 5195 - DNA, 15 bp, synthetic construct
  source 1..15: mol_type = other DNA
aaatactagtgctgt

SEQ ID NO: 5196 - DNA, 15 bp, synthetic construct
  source 1..15: mol_type = other DNA
gcacaggtatagctg

SEQ ID NO: 5197 - DNA, 15 bp, synthetic construct
  source 1..15: mol_type = other DNA
atccgggcagcatgc

SEQ ID NO: 5198 - DNA, 15 bp, synthetic construct
  source 1..15: mol_type = other DNA
tgtttacgggcaggc

SEQ ID NO: 5199 - DNA, 15 bp, synthetic construct
  source 1..15: mol_type = other DNA
cgtgaccatctataa

SEQ ID NO: 5200 - DNA, 15 bp, synthetic construct
  source 1..15: mol_type = other DNA
acgtgggcaagccaa

SEQ ID NO: 5201 - DNA, 15 bp, synthetic construct
  source 1..15: mol_type = other DNA
agcgccagaaactgg

SEQ ID NO: 5202 - DNA, 15 bp, synthetic construct
  source 1..15: mol_type = other DNA
gcaccatgtgagacc

SEQ ID NO: 5203 - DNA, 15 bp, synthetic construct
  source 1..15: mol_type = other DNA
gagacatgagtgcct

SEQ ID NO: 5204 - DNA, 15 bp, synthetic construct
  source 1..15: mol_type = other DNA
gaacctgtgtgggca

SEQ ID NO: 5205 - DNA, 15 bp, synthetic construct
  source 1..15: mol_type = other DNA
atcagggtagagctg

SEQ ID NO: 5206 - DNA, 15 bp, synthetic construct
  source 1..15: mol_type = other DNA
aaacgaaggtgaaca

SEQ ID NO: 5207 - DNA, 15 bp, synthetic construct
  source 1..15: mol_type = other DNA
gaaacttgtgaagta

SEQ ID NO: 5208 - DNA, 15 bp, synthetic construct
  source 1..15: mol_type = other DNA
gataaactatcttgc

SEQ ID NO: 5209 - DNA, 15 bp, synthetic construct
  source 1..15: mol_type = other DNA
gcttgggcctatctg

SEQ ID NO: 5210 - DNA, 15 bp, synthetic construct
  source 1..15: mol_type = other DNA
agtcatctggcagca

SEQ ID NO: 5211 - DNA, 15 bp, synthetic construct
  source 1..15: mol_type = other DNA
agagtgggctacagg

SEQ ID NO: 5212 - DNA, 15 bp, synthetic construct
  source 1..15: mol_type = other DNA
tccttggcaggagtg

SEQ ID NO: 5213 - DNA, 15 bp, synthetic construct
  source 1..15: mol_type = other DNA
tgaaacgttcacact

SEQ ID NO: 5214 - DNA, 15 bp, synthetic construct
  source 1..15: mol_type = other DNA
gggagttattcacag

SEQ ID NO: 5215 - DNA, 15 bp, synthetic construct
  source 1..15: mol_type = other DNA
tgggctatggtcaaa

SEQ ID NO: 5216 - DNA, 15 bp, synthetic construct
  source 1..15: mol_type = other DNA
tctggttacaggcta

SEQ ID NO: 5217 - DNA, 15 bp, synthetic construct
  source 1..15: mol_type = other DNA
ggcatacagaagccc

SEQ ID NO: 5218 - DNA, 15 bp, synthetic construct
  source 1..15: mol_type = other DNA
tgctgtctgttagag

SEQ ID NO: 5219 - DNA, 15 bp, synthetic construct
  source 1..15: mol_type = other DNA
gtgtgagttctggga

SEQ ID NO: 5220 - DNA, 15 bp, synthetic construct
  source 1..15: mol_type = other DNA
agccggtagtatgat

SEQ ID NO: 5221 - DNA, 15 bp, synthetic construct
  source 1..15: mol_type = other DNA
gttgagatgccagac

SEQ ID NO: 5222 - DNA, 15 bp, synthetic construct
  source 1..15: mol_type = other DNA
catcagctgtaccct

SEQ ID NO: 5223 - DNA, 15 bp, synthetic construct
  source 1..15: mol_type = other DNA
gtgaaagagcgaggt

SEQ ID NO: 5224 - DNA, 15 bp, synthetic construct
  source 1..15: mol_type = other DNA
tatgtctaaggaggg

SEQ ID NO: 5225 - DNA, 15 bp, synthetic construct
  source 1..15: mol_type = other DNA
ttatccacctggaaa

SEQ ID NO: 5226 - DNA, 15 bp, synthetic construct
  source 1..15: mol_type = other DNA
acatgtcttggaggt

SEQ ID NO: 5227 - DNA, 15 bp, synthetic construct
  source 1..15: mol_type = other DNA
ctggcgattgaagag

SEQ ID NO: 5228 - DNA, 15 bp, synthetic construct
  source 1..15: mol_type = other DNA
aaccaatggaccagt

SEQ ID NO: 5229 - DNA, 15 bp, synthetic construct
  source 1..15: mol_type = other DNA
ttggcacgacacaat

SEQ ID NO: 5230 - DNA, 15 bp, synthetic construct
  source 1..15: mol_type = other DNA
atttccaaaactctc

SEQ ID NO: 5231 - DNA, 15 bp, synthetic construct
  source 1..15: mol_type = other DNA
cacatgatgcagagt

SEQ ID NO: 5232 - DNA, 15 bp, synthetic construct
  source 1..15: mol_type = other DNA
gtagactttcccact

SEQ ID NO: 5233 - DNA, 15 bp, synthetic construct
  source 1..15: mol_type = other DNA
gaagacaggatttat

SEQ ID NO: 5234 - DNA, 15 bp, synthetic construct
  source 1..15: mol_type = other DNA
atttcccaatgactg

SEQ ID NO: 5235 - DNA, 15 bp, synthetic construct
  source 1..15: mol_type = other DNA
gatcactggcagttg

SEQ ID NO: 5236 - DNA, 15 bp, synthetic construct
  source 1..15: mol_type = other DNA
tagtagactcttccc

SEQ ID NO: 5237 - DNA, 15 bp, synthetic construct
  source 1..15: mol_type = other DNA
gcgaaagccctcaat

SEQ ID NO: 5238 - DNA, 15 bp, synthetic construct
  source 1..15: mol_type = other DNA
cttctcggagctctg

SEQ ID NO: 5239 - DNA, 15 bp, synthetic construct
  source 1..15: mol_type = other DNA
cccactaaagcaggt

SEQ ID NO: 5240 - DNA, 15 bp, synthetic construct
  source 1..15: mol_type = other DNA
cagtgcccaaggtgc

SEQ ID NO: 5241 - DNA, 15 bp, synthetic construct
  source 1..15: mol_type = other DNA
ggttcatgccatgaa

SEQ ID NO: 5242 - DNA, 15 bp, synthetic construct
  source 1..15: mol_type = other DNA
ggaattgttgctgta

SEQ ID NO: 5243 - DNA, 15 bp, synthetic construct
  source 1..15: mol_type = other DNA
ctggaggagaaaggg

SEQ ID NO: 5244 - DNA, 15 bp, synthetic construct
  source 1..15: mol_type = other DNA
ctttaaaatgggtgt

SEQ ID NO: 5245 - DNA, 15 bp, synthetic construct
  source 1..15: mol_type = other DNA
cggtgacatcaaaag

SEQ ID NO: 5246 - DNA, 15 bp, synthetic construct
  source 1..15: mol_type = other DNA
gcagtgtgttatccc

SEQ ID NO: 5247 - DNA, 15 bp, synthetic construct
  source 1..15: mol_type = other DNA
tggtgactgaatgag

SEQ ID NO: 5248 - DNA, 15 bp, synthetic construct
  source 1..15: mol_type = other DNA
gcgcgatctggtacc

SEQ ID NO: 5249 - DNA, 15 bp, synthetic construct
  source 1..15: mol_type = other DNA
ttgaacttgtcatag

SEQ ID NO: 5250 - DNA, 15 bp, synthetic construct
  source 1..15: mol_type = other DNA
cgatcatgttggaca

SEQ ID NO: 5251 - DNA, 15 bp, synthetic construct
  source 1..15: mol_type = other DNA
caggctccaaatgta

SEQ ID NO: 5252 - DNA, 15 bp, synthetic construct
  source 1..15: mol_type = other DNA
tggatagtcccgcgg

SEQ ID NO: 5253 - DNA, 15 bp, synthetic construct
  source 1..15: mol_type = other DNA
gttgtacagggccag

SEQ ID NO: 5254 - DNA, 15 bp, synthetic construct
  source 1..15: mol_type = other DNA
ctcagcagacgcagc

SEQ ID NO: 5255 - DNA, 15 bp, synthetic construct
  source 1..15: mol_type = other DNA
ccattagcacgcggg

SEQ ID NO: 5256 - DNA, 15 bp, synthetic construct
  source 1..15: mol_type = other DNA
ggcaaaggaatagtg

SEQ ID NO: 5257 - DNA, 15 bp, synthetic construct
  source 1..15: mol_type = other DNA
cgttaggctggtcac

SEQ ID NO: 5258 - DNA, 15 bp, synthetic construct
  source 1..15: mol_type = other DNA
atcgcatgcagcact

SEQ ID NO: 5259 - DNA, 15 bp, synthetic construct
  source 1..15: mol_type = other DNA
ggcagtccagacgaa

SEQ ID NO: 5260 - DNA, 15 bp, synthetic construct
  source 1..15: mol_type = other DNA
ggaggagagaaagac

SEQ ID NO: 5261 - DNA, 15 bp, synthetic construct
  source 1..15: mol_type = other DNA
atctggataggacac

SEQ ID NO: 5262 - DNA, 15 bp, synthetic construct
  source 1..15: mol_type = other DNA
ccttccagaaatacc

SEQ ID NO: 5263 - DNA, 15 bp, synthetic construct
  source 1..15: mol_type = other DNA
aaagaagcccagtgt

SEQ ID NO: 5264 - DNA, 15 bp, synthetic construct
  source 1..15: mol_type = other DNA
ccgggtaggtttatt

SEQ ID NO: 5265 - DNA, 15 bp, synthetic construct
  source 1..15: mol_type = other DNA
ggaagaaatgggtct

SEQ ID NO: 5266 - DNA, 15 bp, synthetic construct
  source 1..15: mol_type = other DNA
taagtcactcgccat

SEQ ID NO: 5267 - DNA, 15 bp, synthetic construct
  source 1..15: mol_type = other DNA
aggatgcttcccaat

SEQ ID NO: 5268 - DNA, 15 bp, synthetic construct
  source 1..15: mol_type = other DNA
agattcacgcaaagc

SEQ ID NO: 5269 - DNA, 15 bp, synthetic construct
  source 1..15: mol_type = other DNA
tgtctcacgggtcag

SEQ ID NO: 5270 - DNA, 15 bp, synthetic construct
  source 1..15: mol_type = other DNA
cctatctgcagagca

SEQ ID NO: 5271 - DNA, 15 bp, synthetic construct
  source 1..15: mol_type = other DNA
ggtatgtgtgctcag

SEQ ID NO: 5272 - DNA, 15 bp, synthetic construct
  source 1..15: mol_type = other DNA
taatcgcatgcagca

SEQ ID NO: 5273 - DNA, 15 bp, synthetic construct
  source 1..15: mol_type = other DNA
aaggatgctcccaga

SEQ ID NO: 5274 - DNA, 15 bp, synthetic construct
  source 1..15: mol_type = other DNA
tactagagtgtgaca

SEQ ID NO: 5275 - DNA, 15 bp, synthetic construct
  source 1..15: mol_type = other DNA
ggcgatgactgcttc

SEQ ID NO: 5276 - DNA, 15 bp, synthetic construct
  source 1..15: mol_type = other DNA
tcctgagaagtgtcc

SEQ ID NO: 5277 - DNA, 15 bp, synthetic construct
  source 1..15: mol_type = other DNA
ggtttgagggattgg

SEQ ID NO: 5278 - DNA, 15 bp, synthetic construct
  source 1..15: mol_type = other DNA
tgtatttgctggtga

SEQ ID NO: 5279 - DNA, 15 bp, synthetic construct
  source 1..15: mol_type = other DNA
ttgagatgttgtgcg

SEQ ID NO: 5280 - DNA, 15 bp, synthetic construct
  source 1..15: mol_type = other DNA
acgagttcagggtcc

SEQ ID NO: 5281 - DNA, 15 bp, synthetic construct
  source 1..15: mol_type = other DNA
cttctctccttacta

SEQ ID NO: 5282 - DNA, 15 bp, synthetic construct
  source 1..15: mol_type = other DNA
acctggcaccgtgct

SEQ ID NO: 5283 - DNA, 15 bp, synthetic construct
  source 1..15: mol_type = other DNA
tagggacttacaggc

SEQ ID NO: 5284 - DNA, 15 bp, synthetic construct
  source 1..15: mol_type = other DNA
gactttcagctccaa

SEQ ID NO: 5285 - DNA, 15 bp, synthetic construct
  source 1..15: mol_type = other DNA
tcccttgaaggagat

SEQ ID NO: 5286 - DNA, 15 bp, synthetic construct
  source 1..15: mol_type = other DNA
ccaggaagattctcc

SEQ ID NO: 5287 - DNA, 15 bp, synthetic construct
  source 1..15: mol_type = other DNA
gccttaccagcttct

SEQ ID NO: 5288 - DNA, 15 bp, synthetic construct
  source 1..15: mol_type = other DNA
cagcgactggagggt

SEQ ID NO: 5289 - DNA, 15 bp, synthetic construct
  source 1..15: mol_type = other DNA
tgggacaaaggtctt

SEQ ID NO: 5290 - DNA, 15 bp, synthetic construct
  source 1..15: mol_type = other DNA
tggatagcgcatgtc

SEQ ID NO: 5291 - DNA, 15 bp, synthetic construct
  source 1..15: mol_type = other DNA
gctgtgcagatgacc

SEQ ID NO: 5292 - DNA, 15 bp, synthetic construct
  source 1..15: mol_type = other DNA
gaggagattagagga

SEQ ID NO: 5293 - DNA, 15 bp, synthetic construct
  source 1..15: mol_type = other DNA
tttcccaaactcact

SEQ ID NO: 5294 - DNA, 15 bp, synthetic construct
  source 1..15: mol_type = other DNA
gatagagccaccttt

SEQ ID NO: 5295 - DNA, 15 bp, synthetic construct
  source 1..15: mol_type = other DNA
aggtagatcaaggcc

SEQ ID NO: 5296 - DNA, 15 bp, synthetic construct
  source 1..15: mol_type = other DNA
gctggccattatgag

SEQ ID NO: 5297 - DNA, 15 bp, synthetic construct
  source 1..15: mol_type = other DNA
aaatggaatagaacg

SEQ ID NO: 5298 - DNA, 15 bp, synthetic construct
  source 1..15: mol_type = other DNA
ctcatgagagctgga

SEQ ID NO: 5299 - DNA, 15 bp, synthetic construct
  source 1..15: mol_type = other DNA
ccagggaatctaccc

SEQ ID NO: 5300 - DNA, 15 bp, synthetic construct
  source 1..15: mol_type = other DNA
ccaagtcagcattac

SEQ ID NO: 5301 - DNA, 15 bp, synthetic construct
  source 1..15: mol_type = other DNA
gggaaacacaaccta

SEQ ID NO: 5302 - DNA, 15 bp, synthetic construct
  source 1..15: mol_type = other DNA
tgcagaagtactccc

SEQ ID NO: 5303 - DNA, 15 bp, synthetic construct
  source 1..15: mol_type = other DNA
agcctatgccaacta

SEQ ID NO: 5304 - DNA, 15 bp, synthetic construct
  source 1..15: mol_type = other DNA
ggtcctgaaaacctg

SEQ ID NO: 5305 - DNA, 15 bp, synthetic construct
  source 1..15: mol_type = other DNA
gtagcatgctttggg

SEQ ID NO: 5306 - DNA, 15 bp, synthetic construct
  source 1..15: mol_type = other DNA
agagatctcacagaa

SEQ ID NO: 5307 - DNA, 15 bp, synthetic construct
  source 1..15: mol_type = other DNA
tgctggccaatcaat

SEQ ID NO: 5308 - DNA, 15 bp, synthetic construct
  source 1..15: mol_type = other DNA
caattcccttggata

SEQ ID NO: 5309 - DNA, 15 bp, synthetic construct
  source 1..15: mol_type = other DNA
gggagtcactatagg

SEQ ID NO: 5310 - DNA, 15 bp, synthetic construct
  source 1..15: mol_type = other DNA
ctatcactagcaggc

SEQ ID NO: 5311 - DNA, 15 bp, synthetic construct
  source 1..15: mol_type = other DNA
ccttttgtggccaca

SEQ ID NO: 5312 - DNA, 15 bp, synthetic construct
  source 1..15: mol_type = other DNA
ggaagaaagaatgac

SEQ ID NO: 5313 - DNA, 15 bp, synthetic construct
  source 1..15: mol_type = other DNA
ctcgcgctgagttcc

SEQ ID NO: 5314 - DNA, 15 bp, synthetic construct
  source 1..15: mol_type = other DNA
agcagtgaaagagca

SEQ ID NO: 5315 - DNA, 15 bp, synthetic construct
  source 1..15: mol_type = other DNA
gtccagcaaaatctt

SEQ ID NO: 5316 - DNA, 15 bp, synthetic construct
  source 1..15: mol_type = other DNA
gacggtacatccacg

SEQ ID NO: 5317 - DNA, 15 bp, synthetic construct
  source 1..15: mol_type = other DNA
agaaccctgtcttcc

SEQ ID NO: 5318 - DNA, 15 bp, synthetic construct
  source 1..15: mol_type = other DNA
gagaagcctgattgg

SEQ ID NO: 5319 - DNA, 15 bp, synthetic construct
  source 1..15: mol_type = other DNA
aagtaactatggctg

SEQ ID NO: 5320 - DNA, 15 bp, synthetic construct
  source 1..15: mol_type = other DNA
ttacccaaaatcctt

SEQ ID NO: 5321 - DNA, 15 bp, synthetic construct
  source 1..15: mol_type = other DNA
aacaccaaacactgt

SEQ ID NO: 5322 - DNA, 15 bp, synthetic construct
  source 1..15: mol_type = other DNA
gtttgctgagttgaa

SEQ ID NO: 5323 - DNA, 15 bp, synthetic construct
  source 1..15: mol_type = other DNA
gattacagttggccc

SEQ ID NO: 5324 - DNA, 15 bp, synthetic construct
  source 1..15: mol_type = other DNA
ctgttgctaatgtag

SEQ ID NO: 5325 - DNA, 15 bp, synthetic construct
  source 1..15: mol_type = other DNA
atacaccctctagta

SEQ ID NO: 5326 - DNA, 15 bp, synthetic construct
  source 1..15: mol_type = other DNA
ttggtcactaagagc

SEQ ID NO: 5327 - DNA, 15 bp, synthetic construct
  source 1..15: mol_type = other DNA
gcaaagtctctccgg

SEQ ID NO: 5328 - DNA, 15 bp, synthetic construct
  source 1..15: mol_type = other DNA
ggtcaaggcttttta

SEQ ID NO: 5329 - DNA, 15 bp, synthetic construct
  source 1..15: mol_type = other DNA
ataagaccaggaagc

SEQ ID NO: 5330 - DNA, 15 bp, synthetic construct
  source 1..15: mol_type = other DNA
cacactcaccaggga

SEQ ID NO: 5331 - DNA, 15 bp, synthetic construct
  source 1..15: mol_type = other DNA
gctctcacttatgag

SEQ ID NO: 5332 - DNA, 15 bp, synthetic construct
  source 1..15: mol_type = other DNA
ttagcataaggcctg

SEQ ID NO: 5333 - DNA, 15 bp, synthetic construct
  source 1..15: mol_type = other DNA
gttggttgaaatgcc

SEQ ID NO: 5334 - DNA, 15 bp, synthetic construct
  source 1..15: mol_type = other DNA
cagccagagtgtgtg

SEQ ID NO: 5335 - DNA, 15 bp, synthetic construct
  source 1..15: mol_type = other DNA
ccagttgacactgag

SEQ ID NO: 5336 - DNA, 15 bp, synthetic construct
  source 1..15: mol_type = other DNA
ccattgaagatgcca

SEQ ID NO: 5337 - DNA, 15 bp, synthetic construct
  source 1..15: mol_type = other DNA
aagtctgtgcaataa

SEQ ID NO: 5338 - DNA, 15 bp, synthetic construct
  source 1..15: mol_type = other DNA
tgagctcaccatcaa

SEQ ID NO: 5339 - DNA, 15 bp, synthetic construct
  source 1..15: mol_type = other DNA
ggcttggtagatcaa

SEQ ID NO: 5340 - DNA, 15 bp, synthetic construct
  source 1..15: mol_type = other DNA
gtccaagtgctctag

SEQ ID NO: 5341 - DNA, 15 bp, synthetic construct
  source 1..15: mol_type = other DNA
agccatttcactatc

SEQ ID NO: 5342 - DNA, 15 bp, synthetic construct
  source 1..15: mol_type = other DNA
taaggtagagaggtg

SEQ ID NO: 5343 - DNA, 15 bp, synthetic construct
  source 1..15: mol_type = other DNA
agccatagacatcca

SEQ ID NO: 5344 - DNA, 15 bp, synthetic construct
  source 1..15: mol_type = other DNA
gaaccgatcttggga

SEQ ID NO: 5345 - DNA, 15 bp, synthetic construct
  source 1..15: mol_type = other DNA
tatcctgattctgct

SEQ ID NO: 5346 - DNA, 15 bp, synthetic construct
  source 1..15: mol_type = other DNA
aagagatcaagagat

SEQ ID NO: 5347 - DNA, 15 bp, synthetic construct
  source 1..15: mol_type = other DNA
acagatactacaagc

SEQ ID NO: 5348 - DNA, 15 bp, synthetic construct
  source 1..15: mol_type = other DNA
tctcagagaaatgga

SEQ ID NO: 5349 - DNA, 15 bp, synthetic construct
  source 1..15: mol_type = other DNA
tccagttgacactga

SEQ ID NO: 5350 - DNA, 15 bp, synthetic construct
  source 1..15: mol_type = other DNA
acctctgtaaggaga

SEQ ID NO: 5351 - DNA, 15 bp, synthetic construct
  source 1..15: mol_type = other DNA
cattccattcgttca

SEQ ID NO: 5352 - DNA, 15 bp, synthetic construct
  source 1..15: mol_type = other DNA
ttgttctaagcccaa

SEQ ID NO: 5353 - DNA, 15 bp, synthetic construct
  source 1..15: mol_type = other DNA
cactcgaggtccctt

SEQ ID NO: 5354 - DNA, 15 bp, synthetic construct
  source 1..15: mol_type = other DNA
tgcggttgtccgaca

SEQ ID NO: 5355 - DNA, 15 bp, synthetic construct
  source 1..15: mol_type = other DNA
cgcccacatcgagca

SEQ ID NO: 5356 - DNA, 15 bp, synthetic construct
  source 1..15: mol_type = other DNA
gatgttgttgtgggc

SEQ ID NO: 5357 - DNA, 15 bp, synthetic construct
  source 1..15: mol_type = other DNA
tctcactcaggtcca

SEQ ID NO: 5358 - DNA, 15 bp, synthetic construct
  source 1..15: mol_type = other DNA
gctgtgttaggccct

SEQ ID NO: 5359 - DNA, 15 bp, synthetic construct
  source 1..15: mol_type = other DNA
tggaggacaaggaaa

SEQ ID NO: 5360 - DNA, 15 bp, synthetic construct
  source 1..15: mol_type = other DNA
ccagcttattgtggg

SEQ ID NO: 5361 - DNA, 15 bp, synthetic construct
  source 1..15: mol_type = other DNA
aggacaacagcagat

SEQ ID NO: 5362 - DNA, 15 bp, synthetic construct
  source 1..15: mol_type = other DNA
ttcaagacggctcag

SEQ ID NO: 5363 - DNA, 15 bp, synthetic construct
  source 1..15: mol_type = other DNA
atttgggcagcgcag

SEQ ID NO: 5364 - DNA, 15 bp, synthetic construct
  source 1..15: mol_type = other DNA
attgtcacggagacg

SEQ ID NO: 5365 - DNA, 15 bp, synthetic construct
  source 1..15: mol_type = other DNA
ggttatagaagtggt

SEQ ID NO: 5366 - DNA, 15 bp, synthetic construct
  source 1..15: mol_type = other DNA
ttgtcgaagaccacg

SEQ ID NO: 5367 - DNA, 15 bp, synthetic construct
  source 1..15: mol_type = other DNA
tcatctgcagacgca

SEQ ID NO: 5368 - DNA, 15 bp, synthetic construct
  source 1..15: mol_type = other DNA
atgttggtatggctg

SEQ ID NO: 5369 - DNA, 15 bp, synthetic construct
  source 1..15: mol_type = other DNA
cgagatgcagttgtg

SEQ ID NO: 5370 - DNA, 15 bp, synthetic construct
  source 1..15: mol_type = other DNA
gatccaaggtgaagt

SEQ ID NO: 5371 - DNA, 15 bp, synthetic construct
  source 1..15: mol_type = other DNA
gggcgttggcgctaa

SEQ ID NO: 5372 - DNA, 15 bp, synthetic construct
  source 1..15: mol_type = other DNA
ggctcgatggtcatg

SEQ ID NO: 5373 - DNA, 15 bp, synthetic construct
  source 1..15: mol_type = other DNA
agatgccgcaggctg

SEQ ID NO: 5374 - DNA, 15 bp, synthetic construct
  source 1..15: mol_type = other DNA
atgaataggaagcgc

SEQ ID NO: 5375 - DNA, 15 bp, synthetic construct
  source 1..15: mol_type = other DNA
atctagtatttgcag

SEQ ID NO: 5376 - DNA, 15 bp, synthetic construct
  source 1..15: mol_type = other DNA
gcggaagaagatgcc

SEQ ID NO: 5377 - DNA, 15 bp, synthetic construct
  source 1..15: mol_type = other DNA
atcgagtaatgatag

SEQ ID NO: 5378 - DNA, 15 bp, synthetic construct
  source 1..15: mol_type = other DNA
gcggcttgagttcaa

SEQ ID NO: 5379 - DNA, 15 bp, synthetic construct
  source 1..15: mol_type = other DNA
tgtcatagacatatc

SEQ ID NO: 5380 - DNA, 15 bp, synthetic construct
  source 1..15: mol_type = other DNA
ggatgcacctcgtag

SEQ ID NO: 5381 - DNA, 15 bp, synthetic construct
  source 1..15: mol_type = other DNA
ggacgtgcaggctga

SEQ ID NO: 5382 - DNA, 15 bp, synthetic construct
  source 1..15: mol_type = other DNA
atccggctccataga

SEQ ID NO: 5383 - DNA, 15 bp, synthetic construct
  source 1..15: mol_type = other DNA
ccggcacttgtgttc

SEQ ID NO: 5384 - DNA, 15 bp, synthetic construct
  source 1..15: mol_type = other DNA
ggttttccggttggt

SEQ ID NO: 5385 - DNA, 15 bp, synthetic construct
  source 1..15: mol_type = other DNA
aagtgaccagaggcc

SEQ ID NO: 5386 - DNA, 15 bp, synthetic construct
  source 1..15: mol_type = other DNA
tgagaagcaccttgg

SEQ ID NO: 5387 - DNA, 15 bp, synthetic construct
  source 1..15: mol_type = other DNA
gtctgtaagctttgg

SEQ ID NO: 5388 - DNA, 15 bp, synthetic construct
  source 1..15: mol_type = other DNA
gcacacagggtgcca

SEQ ID NO: 5389 - DNA, 15 bp, synthetic construct
  source 1..15: mol_type = other DNA
tccttggctagagta

SEQ ID NO: 5390 - DNA, 15 bp, synthetic construct
  source 1..15: mol_type = other DNA
ggatttgggctgcgt

SEQ ID NO: 5391 - DNA, 15 bp, synthetic construct
  source 1..15: mol_type = other DNA
atggattgttaagag

SEQ ID NO: 5392 - DNA, 15 bp, synthetic construct
  source 1..15: mol_type = other DNA
agtccgtgaatacca

SEQ ID NO: 5393 - DNA, 15 bp, synthetic construct
  source 1..15: mol_type = other DNA
atgaagtttggtccg

SEQ ID NO: 5394 - DNA, 15 bp, synthetic construct
  source 1..15: mol_type = other DNA
gggtgatgatggagc

SEQ ID NO: 5395 - DNA, 15 bp, synthetic construct
  source 1..15: mol_type = other DNA
tgtcattgttcttgg

SEQ ID NO: 5396 - DNA, 15 bp, synthetic construct
  source 1..15: mol_type = other DNA
gtgagaggaagagaa

SEQ ID NO: 5397 - DNA, 15 bp, synthetic construct
  source 1..15: mol_type = other DNA
tggtggtcttgttgc

SEQ ID NO: 5398 - DNA, 15 bp, synthetic construct
  source 1..15: mol_type = other DNA
attgatctcagcgct

SEQ ID NO: 5399 - DNA, 15 bp, synthetic construct
  source 1..15: mol_type = other DNA
gccagcacttcactg

SEQ ID NO: 5400 - DNA, 15 bp, synthetic construct
  source 1..15: mol_type = other DNA
cagtgctcatggtgt

SEQ ID NO: 5401 - DNA, 15 bp, synthetic construct
  source 1..15: mol_type = other DNA
acagacacaactccc

SEQ ID NO: 5402 - DNA, 15 bp, synthetic construct
  source 1..15: mol_type = other DNA
aggaggttgaccttg

SEQ ID NO: 5403 - DNA, 15 bp, synthetic construct
  source 1..15: mol_type = other DNA
tctccctcttagctg

SEQ ID NO: 5404 - DNA, 15 bp, synthetic construct
  source 1..15: mol_type = other DNA
agtctggaaacatct

SEQ ID NO: 5405 - DNA, 15 bp, synthetic construct
  source 1..15: mol_type = other DNA
tccacgccattggcc

SEQ ID NO: 5406 - DNA, 15 bp, synthetic construct
  source 1..15: mol_type = other DNA
cagactcggcaaagt

SEQ ID NO: 5407 - DNA, 15 bp, synthetic construct
  source 1..15: mol_type = other DNA
tcacggaaaacatgt

SEQ ID NO: 5408 - DNA, 15 bp, synthetic construct
  source 1..15: mol_type = other DNA
gacagttggtcacca

SEQ ID NO: 5409 - DNA, 15 bp, synthetic construct
  source 1..15: mol_type = other DNA
ggtcttctcaagtcc

SEQ ID NO: 5410 - DNA, 15 bp, synthetic construct
  source 1..15: mol_type = other DNA
ttggatgttcgtcct

SEQ ID NO: 5411 - DNA, 15 bp, synthetic construct
  source 1..15: mol_type = other DNA
gggtaataaagggat

SEQ ID NO: 5412 - DNA, 15 bp, synthetic construct
  source 1..15: mol_type = other DNA
gggttcgagaagatg

SEQ ID NO: 5413 - DNA, 15 bp, synthetic construct
  source 1..15: mol_type = other DNA
gatcaaagctgtagg

SEQ ID NO: 5414 - DNA, 15 bp, synthetic construct
  source 1..15: mol_type = other DNA
tccgaccctaagccc

SEQ ID NO: 5415 - DNA, 15 bp, synthetic construct
  source 1..15: mol_type = other DNA
attaagctcagtccc

SEQ ID NO: 5416 - DNA, 15 bp, synthetic construct
  source 1..15: mol_type = other DNA
tgctcgagtcgaaat

SEQ ID NO: 5417 - DNA, 15 bp, synthetic construct
  source 1..15: mol_type = other DNA
ttcatcaccagtcct

SEQ ID NO: 5418 - DNA, 15 bp, synthetic construct
  source 1..15: mol_type = other DNA
cgcattcgttccttt

SEQ ID NO: 5419 - DNA, 15 bp, synthetic construct
  source 1..15: mol_type = other DNA
aaaatacagtcatcc

SEQ ID NO: 5420 - DNA, 15 bp, synthetic construct
  source 1..15: mol_type = other DNA
cttccaccgtgtact

SEQ ID NO: 5421 - DNA, 15 bp, synthetic construct
  source 1..15: mol_type = other DNA
atgcagcaagagcag

SEQ ID NO: 5422 - DNA, 15 bp, synthetic construct
  source 1..15: mol_type = other DNA
acagtaacctagaga

SEQ ID NO: 5423 - DNA, 15 bp, synthetic construct
  source 1..15: mol_type = other DNA
ttagccatgcccagg

SEQ ID NO: 5424 - DNA, 15 bp, synthetic construct
  source 1..15: mol_type = other DNA
ttgctcttgatgcag

SEQ ID NO: 5425 - DNA, 15 bp, synthetic construct
  source 1..15: mol_type = other DNA
attagaagaacatcg

SEQ ID NO: 5426 - DNA, 15 bp, synthetic construct
  source 1..15: mol_type = other DNA
agaatggttgcgcct

SEQ ID NO: 5427 - DNA, 15 bp, synthetic construct
  source 1..15: mol_type = other DNA
actcaaagcagctgg

SEQ ID NO: 5428 - DNA, 15 bp, synthetic construct
  source 1..15: mol_type = other DNA
caccggtcgttgctg

SEQ ID NO: 5429 - DNA, 15 bp, synthetic construct
  source 1..15: mol_type = other DNA
tattgtggtcccgcg

SEQ ID NO: 5430 - DNA, 15 bp, synthetic construct
  source 1..15: mol_type = other DNA
ggatgccagaggagg

SEQ ID NO: 5431 - DNA, 15 bp, synthetic construct
  source 1..15: mol_type = other DNA
gccgctatgcacacc

SEQ ID NO: 5432 - DNA, 15 bp, synthetic construct
  source 1..15: mol_type = other DNA
ttgtagaagcccggc

SEQ ID NO: 5433 - DNA, 15 bp, synthetic construct
  source 1..15: mol_type = other DNA
agctattgctggccg

SEQ ID NO: 5434 - DNA, 15 bp, synthetic construct
  source 1..15: mol_type = other DNA
cgtaagcagagagcc

SEQ ID NO: 5435 - DNA, 15 bp, synthetic construct
  source 1..15: mol_type = other DNA
gtgcagagttggccc

SEQ ID NO: 5436 - DNA, 15 bp, synthetic construct
  source 1..15: mol_type = other DNA
agagtggctactatg

SEQ ID NO: 5437 - DNA, 15 bp, synthetic construct
  source 1..15: mol_type = other DNA
agcacagactttcca

SEQ ID NO: 5438 - DNA, 15 bp, synthetic construct
  source 1..15: mol_type = other DNA
gttatgactccagga

SEQ ID NO: 5439 - DNA, 15 bp, synthetic construct
  source 1..15: mol_type = other DNA
cggaaactttagtcg

SEQ ID NO: 5440 - DNA, 15 bp, synthetic construct
  source 1..15: mol_type = other DNA
tggcacaggtatgat

SEQ ID NO: 5441 - DNA, 15 bp, synthetic construct
  source 1..15: mol_type = other DNA
aggatcctgcaatga

SEQ ID NO: 5442 - DNA, 15 bp, synthetic construct
  source 1..15: mol_type = other DNA
tggatcactacctcc

SEQ ID NO: 5443 - DNA, 15 bp, synthetic construct
  source 1..15: mol_type = other DNA
catgcgatggccaat

SEQ ID NO: 5444 - DNA, 15 bp, synthetic construct
  source 1..15: mol_type = other DNA
gaaggagatgatctg

SEQ ID NO: 5445 - DNA, 15 bp, synthetic construct
  source 1..15: mol_type = other DNA
atttggaggacaggg

SEQ ID NO: 5446 - DNA, 15 bp, synthetic construct
  source 1..15: mol_type = other DNA
ttgagggttactgag

SEQ ID NO: 5447 - DNA, 15 bp, synthetic construct
  source 1..15: mol_type = other DNA
gcaaatggtgcacca

SEQ ID NO: 5448 - DNA, 15 bp, synthetic construct
  source 1..15: mol_type = other DNA
gcgtgaggaagaaca

SEQ ID NO: 5449 - DNA, 15 bp, synthetic construct
  source 1..15: mol_type = other DNA
acaggtcctttgtcc

SEQ ID NO: 5450 - DNA, 15 bp, synthetic construct
  source 1..15: mol_type = other DNA
atcagtaaccaagca

SEQ ID NO: 5451 - DNA, 15 bp, synthetic construct
  source 1..15: mol_type = other DNA
taacatgggacagag

SEQ ID NO: 5452 - DNA, 15 bp, synthetic construct
  source 1..15: mol_type = other DNA
tggtcctgaaaacac

SEQ ID NO: 5453 - DNA, 15 bp, synthetic construct
  source 1..15: mol_type = other DNA
ttctgtttgtggata

SEQ ID NO: 5454 - DNA, 15 bp, synthetic construct
  source 1..15: mol_type = other DNA
acctaggacacatga

SEQ ID NO: 5455 - DNA, 15 bp, synthetic construct
  source 1..15: mol_type = other DNA
cctaagctttgcttt

SEQ ID NO: 5456 - DNA, 15 bp, synthetic construct
  source 1..15: mol_type = other DNA
ttcacacatgctgca

SEQ ID NO: 5457 - DNA, 15 bp, synthetic construct
  source 1..15: mol_type = other DNA
tcgttaaatgtccca

SEQ ID NO: 5458 - DNA, 15 bp, synthetic construct
  source 1..15: mol_type = other DNA
ccctaaactcaggca

SEQ ID NO: 5459 - DNA, 15 bp, synthetic construct
  source 1..15: mol_type = other DNA
ctacagccatcttcc

SEQ ID NO: 5460 - DNA, 15 bp, synthetic construct
  source 1..15: mol_type = other DNA
cccttttaaagctga

SEQ ID NO: 5461 - DNA, 15 bp, synthetic construct
  source 1..15: mol_type = other DNA
attattgggtagtgt

SEQ ID NO: 5462 - DNA, 15 bp, synthetic construct
  source 1..15: mol_type = other DNA
gtcttctgagatatc

SEQ ID NO: 5463 - DNA, 15 bp, synthetic construct
  source 1..15: mol_type = other DNA
aggaaaatagctaca

SEQ ID NO: 5464 - DNA, 15 bp, synthetic construct
  source 1..15: mol_type = other DNA
gtcccatggcgtagg

SEQ ID NO: 5465 - DNA, 15 bp, synthetic construct
  source 1..15: mol_type = other DNA
atggatgccacgttt

SEQ ID NO: 5466 - DNA, 15 bp, synthetic construct
  source 1..15: mol_type = other DNA
cctgaattttctcct

SEQ ID NO: 5467 - DNA, 15 bp, synthetic construct
  source 1..15: mol_type = other DNA
ccctactgtacagta

SEQ ID NO: 5468 - DNA, 15 bp, synthetic construct
  source 1..15: mol_type = other DNA
aagtcaccagactca

SEQ ID NO: 5469 - DNA, 15 bp, synthetic construct
  source 1..15: mol_type = other DNA
ccgattggattgctc

SEQ ID NO: 5470 - DNA, 15 bp, synthetic construct
  source 1..15: mol_type = other DNA
taaggcgtgactgct

SEQ ID NO: 5471 - DNA, 15 bp, synthetic construct
  source 1..15: mol_type = other DNA
atttcctgttttgga

SEQ ID NO: 5472 - DNA, 15 bp, synthetic construct
  source 1..15: mol_type = other DNA
cgtgcactacatggc

SEQ ID NO: 5473 - DNA, 15 bp, synthetic construct
  source 1..15: mol_type = other DNA
aactgactccactta

SEQ ID NO: 5474 - DNA, 15 bp, synthetic construct
  source 1..15: mol_type = other DNA
atttcctgttatctg

SEQ ID NO: 5475 - DNA, 15 bp, synthetic construct
  source 1..15: mol_type = other DNA
gacaccaccgtgagg

SEQ ID NO: 5476 - DNA, 15 bp, synthetic construct
  source 1..15: mol_type = other DNA
gactggagttgcctt

SEQ ID NO: 5477 - DNA, 15 bp, synthetic construct
  source 1..15: mol_type = other DNA
ggaggatggaaacac

SEQ ID NO: 5478 - DNA, 15 bp, synthetic construct
  source 1..15: mol_type = other DNA
catatcactacttga

SEQ ID NO: 5479 - DNA, 15 bp, synthetic construct
  source 1..15: mol_type = other DNA
caccagaaaaatcat

SEQ ID NO: 5480 - DNA, 15 bp, synthetic construct
  source 1..15: mol_type = other DNA
gcaagcagtcttgag

SEQ ID NO: 5481 - DNA, 15 bp, synthetic construct
  source 1..15: mol_type = other DNA
ctatttttccaccta

SEQ ID NO: 5482 - DNA, 15 bp, synthetic construct
  source 1..15: mol_type = other DNA
agtgatatttgtgca

SEQ ID NO: 5483 - DNA, 15 bp, synthetic construct
  source 1..15: mol_type = other DNA
caagataagaagcta

SEQ ID NO: 5484 - DNA, 15 bp, synthetic construct
  source 1..15: mol_type = other DNA
cgtattccatgacga

SEQ ID NO: 5485 - DNA, 15 bp, synthetic construct
  source 1..15: mol_type = other DNA
acaaccttggcaaca

SEQ ID NO: 5486 - DNA, 15 bp, synthetic construct
  source 1..15: mol_type = other DNA
agtaggattcggact

SEQ ID NO: 5487 - DNA, 15 bp, synthetic construct
  source 1..15: mol_type = other DNA
gcacattacagatgc

SEQ ID NO: 5488 - DNA, 15 bp, synthetic construct
  source 1..15: mol_type = other DNA
agaagacatagtaga

SEQ ID NO: 5489 - DNA, 15 bp, synthetic construct
  source 1..15: mol_type = other DNA
caagactgtggcgcc

SEQ ID NO: 5490 - DNA, 15 bp, synthetic construct
  source 1..15: mol_type = other DNA
tccgacctcggtgaa

SEQ ID NO: 5491 - DNA, 15 bp, synthetic construct
  source 1..15: mol_type = other DNA
agttccgagcctcgg

SEQ ID NO: 5492 - DNA, 15 bp, synthetic construct
  source 1..15: mol_type = other DNA
ccctgaacaggactc

SEQ ID NO: 5493 - DNA, 15 bp, synthetic construct
  source 1..15: mol_type = other DNA
ctctgctacagatgc

SEQ ID NO: 5494 - DNA, 15 bp, synthetic construct
  source 1..15: mol_type = other DNA
gcggtgaggaaaaac

SEQ ID NO: 5495 - DNA, 15 bp, synthetic construct
  source 1..15: mol_type = other DNA
ggtaagaaagcagag

SEQ ID NO: 5496 - DNA, 15 bp, synthetic construct
  source 1..15: mol_type = other DNA
ggaatccgaaaggga

SEQ ID NO: 5497 - DNA, 15 bp, synthetic construct
  source 1..15: mol_type = other DNA
actgaatgatgtccc

SEQ ID NO: 5498 - DNA, 15 bp, synthetic construct
  source 1..15: mol_type = other DNA
tgtccgctgattgcc

SEQ ID NO: 5499 - DNA, 15 bp, synthetic construct
  source 1..15: mol_type = other DNA
acgtgctcagctttt

SEQ ID NO: 5500 - DNA, 15 bp, synthetic construct
  source 1..15: mol_type = other DNA
gtactgcatgagttc

SEQ ID NO: 5501 - DNA, 15 bp, synthetic construct
  source 1..15: mol_type = other DNA
agtccatgctaatct

SEQ ID NO: 5502 - DNA, 15 bp, synthetic construct
  source 1..15: mol_type = other DNA
tttcctcattcccaa

SEQ ID NO: 5503 - DNA, 15 bp, synthetic construct
  source 1..15: mol_type = other DNA
cgtgaagtttcaaaa

SEQ ID NO: 5504 - DNA, 15 bp, synthetic construct
  source 1..15: mol_type = other DNA
taccatgtgtgttct

SEQ ID NO: 5505 - DNA, 15 bp, synthetic construct
  source 1..15: mol_type = other DNA
atctcacttactcaa

SEQ ID NO: 5506 - DNA, 15 bp, synthetic construct
  source 1..15: mol_type = other DNA
gttgcttattgcggc

SEQ ID NO: 5507 - DNA, 15 bp, synthetic construct
  source 1..15: mol_type = other DNA
acatactgggcatgg

SEQ ID NO: 5508 - DNA, 15 bp, synthetic construct
  source 1..15: mol_type = other DNA
aactgtgcgggcctg

SEQ ID NO: 5509 - DNA, 15 bp, synthetic construct
  source 1..15: mol_type = other DNA
cgaaattgctcaggg

SEQ ID NO: 5510 - DNA, 15 bp, synthetic construct
  source 1..15: mol_type = other DNA
tctcactagtggctt

SEQ ID NO: 5511 - DNA, 15 bp, synthetic construct
  source 1..15: mol_type = other DNA
ctcagctcatggttg

SEQ ID NO: 5512 - DNA, 15 bp, synthetic construct
  source 1..15: mol_type = other DNA
catccctccaacaca

SEQ ID NO: 5513 - DNA, 15 bp, synthetic construct
  source 1..15: mol_type = other DNA
ctgttcattttgttc

SEQ ID NO: 5514 - DNA, 15 bp, synthetic construct
  source 1..15: mol_type = other DNA
atgaacagcccaacc

SEQ ID NO: 5515 - DNA, 15 bp, synthetic construct
  source 1..15: mol_type = other DNA
tctgtgggatacgga

SEQ ID NO: 5516 - DNA, 15 bp, synthetic construct
  source 1..15: mol_type = other DNA
actgaggaattcatt

SEQ ID NO: 5517 - DNA, 15 bp, synthetic construct
  source 1..15: mol_type = other DNA
ctatcttcatccgcc

SEQ ID NO: 5518 - DNA, 15 bp, synthetic construct
  source 1..15: mol_type = other DNA
aaatgactaggaggg

SEQ ID NO: 5519 - DNA, 15 bp, synthetic construct
  source 1..15: mol_type = other DNA
ggtctgtgttatagg

SEQ ID NO: 5520 - DNA, 15 bp, synthetic construct
  source 1..15: mol_type = other DNA
caggattttgccaac

SEQ ID NO: 5521 - DNA, 15 bp, synthetic construct
  source 1..15: mol_type = other DNA
accgttctttgtact

SEQ ID NO: 5522 - DNA, 15 bp, synthetic construct
  source 1..15: mol_type = other DNA
taagtctcacggccc

SEQ ID NO: 5523 - DNA, 15 bp, synthetic construct
  source 1..15: mol_type = other DNA
agttcaggcaaacat

SEQ ID NO: 5524 - DNA, 15 bp, synthetic construct
  source 1..15: mol_type = other DNA
tctgagaaaatgctt

SEQ ID NO: 5525 - DNA, 15 bp, synthetic construct
  source 1..15: mol_type = other DNA
ttctttccttggagg

SEQ ID NO: 5526 - DNA, 15 bp, synthetic construct
  source 1..15: mol_type = other DNA
atagaggtgaagata

SEQ ID NO: 5527 - DNA, 15 bp, synthetic construct
  source 1..15: mol_type = other DNA
agtcacttacaggag

SEQ ID NO: 5528 - DNA, 15 bp, synthetic construct
  source 1..15: mol_type = other DNA
atacaaaagaaccca

SEQ ID NO: 5529 - DNA, 15 bp, synthetic construct
  source 1..15: mol_type = other DNA
agctgtttccagacc

SEQ ID NO: 5530 - DNA, 15 bp, synthetic construct
  source 1..15: mol_type = other DNA
tctcctgtgtctttt

SEQ ID NO: 5531 - DNA, 15 bp, synthetic construct
  source 1..15: mol_type = other DNA
ggtacaaacagttca

SEQ ID NO: 5532 - DNA, 15 bp, synthetic construct
  source 1..15: mol_type = other DNA
cagatctggagcaat

SEQ ID NO: 5533 - DNA, 15 bp, synthetic construct
  source 1..15: mol_type = other DNA
tcacaaacggtgcta

SEQ ID NO: 5534 - DNA, 15 bp, synthetic construct
  source 1..15: mol_type = other DNA
cagtagattactttg

SEQ ID NO: 5535 - DNA, 15 bp, synthetic construct
  source 1..15: mol_type = other DNA
agatgtgcttggacc

SEQ ID NO: 5536 - DNA, 15 bp, synthetic construct
  source 1..15: mol_type = other DNA
tttcaaagtaggaga

SEQ ID NO: 5537 - DNA, 15 bp, synthetic construct
  source 1..15: mol_type = other DNA
gagacttgagggtat

SEQ ID NO: 5538 - DNA, 15 bp, synthetic construct
  source 1..15: mol_type = other DNA
ttggagagaagttgc

SEQ ID NO: 5539 - DNA, 15 bp, synthetic construct
  source 1..15: mol_type = other DNA
cacttgcagacccga

SEQ ID NO: 5540 - DNA, 15 bp, synthetic construct
  source 1..15: mol_type = other DNA
ggaactgtttctggc

SEQ ID NO: 5541 - DNA, 15 bp, synthetic construct
  source 1..15: mol_type = other DNA
cagttaacatttggc

SEQ ID NO: 5542 - DNA, 15 bp, synthetic construct
  source 1..15: mol_type = other DNA
ccaaaatatgtacct

SEQ ID NO: 5543 - DNA, 15 bp, synthetic construct
  source 1..15: mol_type = other DNA
caaagcgcatcacgg

SEQ ID NO: 5544 - DNA, 15 bp, synthetic construct
  source 1..15: mol_type = other DNA
tctcataagcataag

SEQ ID NO: 5545 - DNA, 15 bp, synthetic construct
  source 1..15: mol_type = other DNA
tttcttcatctgggc

SEQ ID NO: 5546 - DNA, 15 bp, synthetic construct
  source 1..15: mol_type = other DNA
aaatcaccaccagca

SEQ ID NO: 5547 - DNA, 15 bp, synthetic construct
  source 1..15: mol_type = other DNA
ccaaaggaaagacgg

SEQ ID NO: 5548 - DNA, 15 bp, synthetic construct
  source 1..15: mol_type = other DNA
agggagctagtcacc

SEQ ID NO: 5549 - DNA, 15 bp, synthetic construct
  source 1..15: mol_type = other DNA
ttttctctctgtctc

SEQ ID NO: 5550 - DNA, 15 bp, synthetic construct
  source 1..15: mol_type = other DNA
cagactcttcagctg

SEQ ID NO: 5551 - DNA, 15 bp, synthetic construct
  source 1..15: mol_type = other DNA
ccattgagccacatg

SEQ ID NO: 5552 - DNA, 15 bp, synthetic construct
  source 1..15: mol_type = other DNA
ctgtttgcactggca

SEQ ID NO: 5553 - DNA, 15 bp, synthetic construct
  source 1..15: mol_type = other DNA
agtgcaacttacaga

SEQ ID NO: 5554 - DNA, 15 bp, synthetic construct
  source 1..15: mol_type = other DNA
tagtcagatgaccat

SEQ ID NO: 5555 - DNA, 15 bp, synthetic construct
  source 1..15: mol_type = other DNA
caacgccaggaggag

SEQ ID NO: 5556 - DNA, 15 bp, synthetic construct
  source 1..15: mol_type = other DNA
cctccaaagagggct

SEQ ID NO: 5557 - DNA, 15 bp, synthetic construct
  source 1..15: mol_type = other DNA
aaccgctgcggctgt

SEQ ID NO: 5558 - DNA, 15 bp, synthetic construct
  source 1..15: mol_type = other DNA
atgctgccacttcgc

SEQ ID NO: 5559 - DNA, 15 bp, synthetic construct
  source 1..15: mol_type = other DNA
cccaagtctaacact

SEQ ID NO: 5560 - DNA, 15 bp, synthetic construct
  source 1..15: mol_type = other DNA
cccgacagcaacagg

SEQ ID NO: 5561 - DNA, 15 bp, synthetic construct
  source 1..15: mol_type = other DNA
cttgaggttttgcac

SEQ ID NO: 5562 - DNA, 15 bp, synthetic construct
  source 1..15: mol_type = other DNA
ggtctagagaaggca

SEQ ID NO: 5563 - DNA, 15 bp, synthetic construct
  source 1..15: mol_type = other DNA
catgcacactggccg

SEQ ID NO: 5564 - DNA, 15 bp, synthetic construct
  source 1..15: mol_type = other DNA
tatgcacaagagggt

SEQ ID NO: 5565 - DNA, 15 bp, synthetic construct
  source 1..15: mol_type = other DNA
gaccttcaccgaccc

SEQ ID NO: 5566 - DNA, 15 bp, synthetic construct
  source 1..15: mol_type = other DNA
ctccaatctgagcag

SEQ ID NO: 5567 - DNA, 15 bp, synthetic construct
  source 1..15: mol_type = other DNA
ttctcagaaagaggc

SEQ ID NO: 5568 - DNA, 15 bp, synthetic construct
  source 1..15: mol_type = other DNA
acttttccaatatcc

SEQ ID NO: 5569 - DNA, 15 bp, synthetic construct
  source 1..15: mol_type = other DNA
ggttgtatctctggg

SEQ ID NO: 5570 - DNA, 15 bp, synthetic construct
  source 1..15: mol_type = other DNA
tcccaggcattttaa

SEQ ID NO: 5571 - DNA, 15 bp, synthetic construct
  source 1..15: mol_type = other DNA
acaagtcactgtgca

SEQ ID NO: 5572 - DNA, 15 bp, synthetic construct
  source 1..15: mol_type = other DNA
tttctggatctctag

SEQ ID NO: 5573 - DNA, 15 bp, synthetic construct
  source 1..15: mol_type = other DNA
tttgtggatggattc

SEQ ID NO: 5574 - DNA, 15 bp, synthetic construct
  source 1..15: mol_type = other DNA
ccgtaccatgccagt

SEQ ID NO: 5575 - DNA, 15 bp, synthetic construct
  source 1..15: mol_type = other DNA
tggagctggtagacc

SEQ ID NO: 5576 - DNA, 15 bp, synthetic construct
  source 1..15: mol_type = other DNA
tgactgtgatcggct

SEQ ID NO: 5577 - DNA, 15 bp, synthetic construct
  source 1..15: mol_type = other DNA
agaactgccttcctc

SEQ ID NO: 5578 - DNA, 15 bp, synthetic construct
  source 1..15: mol_type = other DNA
tatccgtatcctcca

SEQ ID NO: 5579 - DNA, 15 bp, synthetic construct
  source 1..15: mol_type = other DNA
gatgacagtgtctcc

SEQ ID NO: 5580 - DNA, 15 bp, synthetic construct
  source 1..15: mol_type = other DNA
gcacaggtaagagtg

SEQ ID NO: 5581 - DNA, 15 bp, synthetic construct
  source 1..15: mol_type = other DNA
gagcaagatatctag

SEQ ID NO: 5582 - DNA, 15 bp, synthetic construct
  source 1..15: mol_type = other DNA
acagaatccatttca

SEQ ID NO: 5583 - DNA, 15 bp, synthetic construct
  source 1..15: mol_type = other DNA
cttcaatggtaggga

SEQ ID NO: 5584 - DNA, 15 bp, synthetic construct
  source 1..15: mol_type = other DNA
cctcattcgtcacct

SEQ ID NO: 5585 - DNA, 15 bp, synthetic construct
  source 1..15: mol_type = other DNA
tcctgtctccgcttt

SEQ ID NO: 5586 - DNA, 15 bp, synthetic construct
  source 1..15: mol_type = other DNA
gggcatttctttcca

SEQ ID NO: 5587 - DNA, 15 bp, synthetic construct
  source 1..15: mol_type = other DNA
agtctatctccagcc

SEQ ID NO: 5588 - DNA, 15 bp, synthetic construct
  source 1..15: mol_type = other DNA
tatttgtgtcccacc

SEQ ID NO: 5589 - DNA, 15 bp, synthetic construct
  source 1..15: mol_type = other DNA
gctgtagattcccat

SEQ ID NO: 5590 - DNA, 15 bp, synthetic construct
  source 1..15: mol_type = other DNA
attaaggttgaacac

SEQ ID NO: 5591 - DNA, 15 bp, synthetic construct
  source 1..15: mol_type = other DNA
ccgccctgtagtgaa

SEQ ID NO: 5592 - DNA, 15 bp, synthetic construct
  source 1..15: mol_type = other DNA
agaaaagaagctgtc

SEQ ID NO: 5593 - DNA, 15 bp, synthetic construct
  source 1..15: mol_type = other DNA
agtcctccattcagg

SEQ ID NO: 5594 - DNA, 15 bp, synthetic construct
  source 1..15: mol_type = other DNA
gaagtttcagtagga

SEQ ID NO: 5595 - DNA, 15 bp, synthetic construct
  source 1..15: mol_type = other DNA
cgggttcattttgca

SEQ ID NO: 5596 - DNA, 15 bp, synthetic construct
  source 1..15: mol_type = other DNA
cagtgtgctagttgg

SEQ ID NO: 5597 - DNA, 15 bp, synthetic construct
  source 1..15: mol_type = other DNA
gggttgtgacaccca

SEQ ID NO: 5598 - DNA, 15 bp, synthetic construct
  source 1..15: mol_type = other DNA
acacaagtggctcca

SEQ ID NO: 5599 - DNA, 15 bp, synthetic construct
  source 1..15: mol_type = other DNA
taacagcctactctg

SEQ ID NO: 5600 - DNA, 15 bp, synthetic construct
  source 1..15: mol_type = other DNA
catcacttgccagca

SEQ ID NO: 5601 - DNA, 15 bp, synthetic construct
  source 1..15: mol_type = other DNA
aacataacttggaag

SEQ ID NO: 5602 - DNA, 15 bp, synthetic construct
  source 1..15: mol_type = other DNA
tcatgctcaaacatc

SEQ ID NO: 5603 - DNA, 15 bp, synthetic construct
  source 1..15: mol_type = other DNA
ggcaaagtatttgta

SEQ ID NO: 5604 - DNA, 15 bp, synthetic construct
  source 1..15: mol_type = other DNA
gagtctacataagta

SEQ ID NO: 5605 - DNA, 15 bp, synthetic construct
  source 1..15: mol_type = other DNA
gagacaggatgcttg

SEQ ID NO: 5606 - DNA, 15 bp, synthetic construct
  source 1..15: mol_type = other DNA
cttttggcccaatgc

SEQ ID NO: 5607 - DNA, 15 bp, synthetic construct
  source 1..15: mol_type = other DNA
cttctgagcagcctc

SEQ ID NO: 5608 - DNA, 15 bp, synthetic construct
  source 1..15: mol_type = other DNA
taagtcctgactcct

SEQ ID NO: 5609 - DNA, 15 bp, synthetic construct
  source 1..15: mol_type = other DNA
ggtgacgttgaatga

SEQ ID NO: 5610 - DNA, 15 bp, synthetic construct
  source 1..15: mol_type = other DNA
tgtgtagcaggagga

SEQ ID NO: 5611 - DNA, 15 bp, synthetic construct
  source 1..15: mol_type = other DNA
ttgtgtgtcttcaat

SEQ ID NO: 5612 - DNA, 15 bp, synthetic construct
  source 1..15: mol_type = other DNA
aggcagcaaagagct

SEQ ID NO: 5613 - DNA, 15 bp, synthetic construct
  source 1..15: mol_type = other DNA
gatcaaggtgctctc

SEQ ID NO: 5614 - DNA, 15 bp, synthetic construct
  source 1..15: mol_type = other DNA
atatcaaattccagc

SEQ ID NO: 5615 - DNA, 15 bp, synthetic construct
  source 1..15: mol_type = other DNA
tggtttcggaggccc

SEQ ID NO: 5616 - DNA, 15 bp, synthetic construct
  source 1..15: mol_type = other DNA
tcatgccagagtctc

SEQ ID NO: 5617 - DNA, 15 bp, synthetic construct
  source 1..15: mol_type = other DNA
gaatcccagaaataa

SEQ ID NO: 5618 - DNA, 15 bp, synthetic construct
  source 1..15: mol_type = other DNA
atttcttgcgctttc

SEQ ID NO: 5619 - DNA, 15 bp, synthetic construct
  source 1..15: mol_type = other DNA
agtgactgtcaccga

SEQ ID NO: 5620 - DNA, 15 bp, synthetic construct
  source 1..15: mol_type = other DNA
gtttcaatggtgtga

SEQ ID NO: 5621 - DNA, 15 bp, synthetic construct
  source 1..15: mol_type = other DNA
tcggtgatttagcag

SEQ ID NO: 5622 - DNA, 15 bp, synthetic construct
  source 1..15: mol_type = other DNA
tccatgaacttcacc

SEQ ID NO: 5623 - DNA, 15 bp, synthetic construct
  source 1..15: mol_type = other DNA
tccagtgaagacacc

SEQ ID NO: 5624 - DNA, 15 bp, synthetic construct
  source 1..15: mol_type = other DNA
ggttcccgaaaccct

SEQ ID NO: 5625 - DNA, 15 bp, synthetic construct
  source 1..15: mol_type = other DNA
aggactgttctgtcg

SEQ ID NO: 5626 - DNA, 15 bp, synthetic construct
  source 1..15: mol_type = other DNA
aacaaatgctttctc

SEQ ID NO: 5627 - DNA, 15 bp, synthetic construct
  source 1..15: mol_type = other DNA
tctctcctatgtgct

SEQ ID NO: 5628 - DNA, 15 bp, synthetic construct
  source 1..15: mol_type = other DNA
gtttttgcaggaaca

SEQ ID NO: 5629 - DNA, 15 bp, synthetic construct
  source 1..15: mol_type = other DNA
gatcctgccctgtct

SEQ ID NO: 5630 - DNA, 15 bp, synthetic construct
  source 1..15: mol_type = other DNA
gggtactcctggaag

SEQ ID NO: 5631 - DNA, 15 bp, synthetic construct
  source 1..15: mol_type = other DNA
ggtccacctaaccgc

SEQ ID NO: 5632 - DNA, 15 bp, synthetic construct
  source 1..15: mol_type = other DNA
ctcttcgccgggaca

SEQ ID NO: 5633 - DNA, 15 bp, synthetic construct
  source 1..15: mol_type = other DNA
tgagtgggaacattc

SEQ ID NO: 5634 - DNA, 15 bp, synthetic construct
  source 1..15: mol_type = other DNA
gggcaccaacgtaca

SEQ ID NO: 5635 - DNA, 15 bp, synthetic construct
  source 1..15: mol_type = other DNA
aactgcactagagac

SEQ ID NO: 5636 - DNA, 15 bp, synthetic construct
  source 1..15: mol_type = other DNA
ttcccaaaactgggt

SEQ ID NO: 5637 - DNA, 15 bp, synthetic construct
  source 1..15: mol_type = other DNA
gtgagagtaagcgaa

SEQ ID NO: 5638 - DNA, 15 bp, synthetic construct
  source 1..15: mol_type = other DNA
ggacctaacgggctc

SEQ ID NO: 5639 - DNA, 15 bp, synthetic construct
  source 1..15: mol_type = other DNA
gcatctggcgttcca

SEQ ID NO: 5640 - DNA, 15 bp, synthetic construct
  source 1..15: mol_type = other DNA
cagtggactcctgct

SEQ ID NO: 5641 - DNA, 15 bp, synthetic construct
  source 1..15: mol_type = other DNA
cagtgctaccaactt

SEQ ID NO: 5642 - DNA, 15 bp, synthetic construct
  source 1..15: mol_type = other DNA
tctttgctcgaatgt

SEQ ID NO: 5643 - DNA, 15 bp, synthetic construct
  source 1..15: mol_type = other DNA
agtttcgttgataac

SEQ ID NO: 5644 - DNA, 15 bp, synthetic construct
  source 1..15: mol_type = other DNA
gaaaaactgcagaaa

SEQ ID NO: 5645 - DNA, 15 bp, synthetic construct
  source 1..15: mol_type = other DNA
ctgcactgagtgtgt

SEQ ID NO: 5646 - DNA, 15 bp, synthetic construct
  source 1..15: mol_type = other DNA
gggtgttttcggctt

SEQ ID NO: 5647 - DNA, 15 bp, synthetic construct
  source 1..15: mol_type = other DNA
aactcggtgttgatg

SEQ ID NO: 5648 - DNA, 15 bp, synthetic construct
  source 1..15: mol_type = other DNA
cacttcacaggtgag

SEQ ID NO: 5649 - DNA, 15 bp, synthetic construct
  source 1..15: mol_type = other DNA
tggttagctggtcca

SEQ ID NO: 5650 - DNA, 15 bp, synthetic construct
  source 1..15: mol_type = other DNA
agacgtgccagagac

SEQ ID NO: 5651 - DNA, 15 bp, synthetic construct
  source 1..15: mol_type = other DNA
tgagtgggtatcaac

SEQ ID NO: 5652 - DNA, 15 bp, synthetic construct
  source 1..15: mol_type = other DNA
ttaagaactagagct

SEQ ID NO: 5653 - DNA, 15 bp, synthetic construct
  source 1..15: mol_type = other DNA
atacgtgggcctccc

SEQ ID NO: 5654 - DNA, 15 bp, synthetic construct
  source 1..15: mol_type = other DNA
aagtctcagcgggct

SEQ ID NO: 5655 - DNA, 15 bp, synthetic construct
  source 1..15: mol_type = other DNA
gctgacgtacgtcac

SEQ ID NO: 5656 - DNA, 15 bp, synthetic construct
  source 1..15: mol_type = other DNA
cgggagttgcgagac

SEQ ID NO: 5657 - DNA, 15 bp, synthetic construct
  source 1..15: mol_type = other DNA
cacgtagctccggct

SEQ ID NO: 5658 - DNA, 15 bp, synthetic construct
  source 1..15: mol_type = other DNA
gtcttggtagttagc

SEQ ID NO: 5659 - DNA, 15 bp, synthetic construct
  source 1..15: mol_type = other DNA
ttggacatgctgttc

SEQ ID NO: 5660 - DNA, 15 bp, synthetic construct
  source 1..15: mol_type = other DNA
acgagccatttcctc

SEQ ID NO: 5661 - DNA, 15 bp, synthetic construct
  source 1..15: mol_type = other DNA
cctagcggtttaggg

SEQ ID NO: 5662 - DNA, 15 bp, synthetic construct
  source 1..15: mol_type = other DNA
ccacagtcattggtg

SEQ ID NO: 5663 - DNA, 15 bp, synthetic construct
  source 1..15: mol_type = other DNA
gcccgtcgaaggtga

SEQ ID NO: 5664 - DNA, 15 bp, synthetic construct
  source 1..15: mol_type = other DNA
agggacactcggtgc

SEQ ID NO: 5665 - DNA, 15 bp, synthetic construct
  source 1..15: mol_type = other DNA
gttactgccgcagta

SEQ ID NO: 5666 - DNA, 15 bp, synthetic construct
  source 1..15: mol_type = other DNA
tggttgccattgtaa

SEQ ID NO: 5667 - DNA, 15 bp, synthetic construct
  source 1..15: mol_type = other DNA
gtctcatccttcatg

SEQ ID NO: 5668 - DNA, 15 bp, synthetic construct
  source 1..15: mol_type = other DNA
gaagatgtcttctgg

SEQ ID NO: 5669 - DNA, 15 bp, synthetic construct
  source 1..15: mol_type = other DNA
catccgggtaagaga

SEQ ID NO: 5670 - DNA, 15 bp, synthetic construct
  source 1..15: mol_type = other DNA
ctcttcatttcatca

SEQ ID NO: 5671 - DNA, 15 bp, synthetic construct
  source 1..15: mol_type = other DNA
caattttgtccgatc

SEQ ID NO: 5672 - DNA, 15 bp, synthetic construct
  source 1..15: mol_type = other DNA
ttttccagtctgtgg

SEQ ID NO: 5673 - DNA, 15 bp, synthetic construct
  source 1..15: mol_type = other DNA
accttgacatactgc

SEQ ID NO: 5674 - DNA, 15 bp, synthetic construct
  source 1..15: mol_type = other DNA
gtatgctggatgcgg

SEQ ID NO: 5675 - DNA, 15 bp, synthetic construct
  source 1..15: mol_type = other DNA
acactcgagcccttc

SEQ ID NO: 5676 - DNA, 15 bp, synthetic construct
  source 1..15: mol_type = other DNA
agttgaccttccgcc

SEQ ID NO: 5677 - DNA, 15 bp, synthetic construct
  source 1..15: mol_type = other DNA
cctgtgacaaggcac

SEQ ID NO: 5678 - DNA, 15 bp, synthetic construct
  source 1..15: mol_type = other DNA
gacaaacaaatggat

SEQ ID NO: 5679 - DNA, 15 bp, synthetic construct
  source 1..15: mol_type = other DNA
aaagttgccgctgcc

SEQ ID NO: 5680 - DNA, 15 bp, synthetic construct
  source 1..15: mol_type = other DNA
ccataaacgttgact

SEQ ID NO: 5681 - DNA, 15 bp, synthetic construct
  source 1..15: mol_type = other DNA
tcacctgtgttattt

SEQ ID NO: 5682 - DNA, 15 bp, synthetic construct
  source 1..15: mol_type = other DNA
accatgtagaccagg

SEQ ID NO: 5683 - DNA, 15 bp, synthetic construct
  source 1..15: mol_type = other DNA
gatacagccctttgg

SEQ ID NO: 5684 - DNA, 15 bp, synthetic construct
  source 1..15: mol_type = other DNA
tccgttctcatcaca

SEQ ID NO: 5685 - DNA, 15 bp, synthetic construct
  source 1..15: mol_type = other DNA
aacgtaagtgaagcc

SEQ ID NO: 5686 - DNA, 15 bp, synthetic construct
  source 1..15: mol_type = other DNA
tctcggaagatctgt

SEQ ID NO: 5687 - DNA, 15 bp, synthetic construct
  source 1..15: mol_type = other DNA
tgggcggtggaaaga

SEQ ID NO: 5688 - DNA, 15 bp, synthetic construct
  source 1..15: mol_type = other DNA
tgtctgtactgtcca

SEQ ID NO: 5689 - DNA, 15 bp, synthetic construct
  source 1..15: mol_type = other DNA
tgccttggaccaacc

SEQ ID NO: 5690 - DNA, 15 bp, synthetic construct
  source 1..15: mol_type = other DNA
atgcctctgcgcagg

SEQ ID NO: 5691 - DNA, 15 bp, synthetic construct
  source 1..15: mol_type = other DNA
ccggacggaacaact

SEQ ID NO: 5692 - DNA, 15 bp, synthetic construct
  source 1..15: mol_type = other DNA
atcgagccattagct

SEQ ID NO: 5693 - DNA, 15 bp, synthetic construct
  source 1..15: mol_type = other DNA
ttactctactgggtg

SEQ ID NO: 5694 - DNA, 15 bp, synthetic construct
  source 1..15: mol_type = other DNA
acgtccacatcacag

SEQ ID NO: 5695 - DNA, 15 bp, synthetic construct
  source 1..15: mol_type = other DNA
atgactttgcctgca

SEQ ID NO: 5696 - DNA, 15 bp, synthetic construct
  source 1..15: mol_type = other DNA
ctggagtggactaca

SEQ ID NO: 5697 - DNA, 15 bp, synthetic construct
  source 1..15: mol_type = other DNA
tctcatccgtgacct

SEQ ID NO: 5698 - DNA, 15 bp, synthetic construct
  source 1..15: mol_type = other DNA
gccacaggcgatgat

SEQ ID NO: 5699 - DNA, 15 bp, synthetic construct
  source 1..15: mol_type = other DNA
gcctagacatctgtg

SEQ ID NO: 5700 - DNA, 15 bp, synthetic construct
  source 1..15: mol_type = other DNA
ggcatgtttgctatc

SEQ ID NO: 5701 - DNA, 15 bp, synthetic construct
  source 1..15: mol_type = other DNA
gcaggagaacactgg

SEQ ID NO: 5702 - DNA, 15 bp, synthetic construct
  source 1..15: mol_type = other DNA
catagctataggcct

SEQ ID NO: 5703 - DNA, 15 bp, synthetic construct
  source 1..15: mol_type = other DNA
cgaacaggcggagac

SEQ ID NO: 5704 - DNA, 15 bp, synthetic construct
  source 1..15: mol_type = other DNA
gacttattcgaaacc

SEQ ID NO: 5705 - DNA, 15 bp, synthetic construct
  source 1..15: mol_type = other DNA
gcaaagcctctggca

SEQ ID NO: 5706 - DNA, 15 bp, synthetic construct
  source 1..15: mol_type = other DNA
actggatggtagtgt

SEQ ID NO: 5707 - DNA, 15 bp, synthetic construct
  source 1..15: mol_type = other DNA
tttgagggaccttac

SEQ ID NO: 5708 - DNA, 15 bp, synthetic construct
  source 1..15: mol_type = other DNA
gcaatgttagccagc

SEQ ID NO: 5709 - DNA, 15 bp, synthetic construct
  source 1..15: mol_type = other DNA
aatgaaaccctcttg

SEQ ID NO: 5710 - DNA, 15 bp, synthetic construct
  source 1..15: mol_type = other DNA
ttgcattgagtcctg

SEQ ID NO: 5711 - DNA, 15 bp, synthetic construct
  source 1..15: mol_type = other DNA
tcagtaaatgccttc

SEQ ID NO: 5712 - DNA, 15 bp, synthetic construct
  source 1..15: mol_type = other DNA
agttatgatgtgtga

SEQ ID NO: 5713 - DNA, 15 bp, synthetic construct
  source 1..15: mol_type = other DNA
ggtaaacatcataac

SEQ ID NO: 5714 - DNA, 15 bp, synthetic construct
  source 1..15: mol_type = other DNA
gagaactgtaagttt

SEQ ID NO: 5715 - DNA, 15 bp, synthetic construct
  source 1..15: mol_type = other DNA
gggttccttttttct

SEQ ID NO: 5716 - DNA, 15 bp, synthetic construct
  source 1..15: mol_type = other DNA
ggccaataaggtgag

SEQ ID NO: 5717 - DNA, 15 bp, synthetic construct
  source 1..15: mol_type = other DNA
tggttgtgagattga

SEQ ID NO: 5718 - DNA, 15 bp, synthetic construct
  source 1..15: mol_type = other DNA
gtgtagctgatctcc

SEQ ID NO: 5719 - DNA, 15 bp, synthetic construct
  source 1..15: mol_type = other DNA
cgcggtgctccattt

SEQ ID NO: 5720 - DNA, 15 bp, synthetic construct
  source 1..15: mol_type = other DNA
gaaataagatgacac

SEQ ID NO: 5721 - DNA, 15 bp, synthetic construct
  source 1..15: mol_type = other DNA
tgtaggctcatccaa

SEQ ID NO: 5722 - DNA, 15 bp, synthetic construct
  source 1..15: mol_type = other DNA
ctgaaacactggttg

SEQ ID NO: 5723 - DNA, 15 bp, synthetic construct
  source 1..15: mol_type = other DNA
aacgcttggaaaccc

SEQ ID NO: 5724 - DNA, 15 bp, synthetic construct
  source 1..15: mol_type = other DNA
cgctgacacgaactt

SEQ ID NO: 5725 - DNA, 15 bp, synthetic construct
  source 1..15: mol_type = other DNA
ccagacacaccacgg

SEQ ID NO: 5726 - DNA, 15 bp, synthetic construct
  source 1..15: mol_type = other DNA
aacttcgacattact

SEQ ID NO: 5727 - DNA, 15 bp, synthetic construct
  source 1..15: mol_type = other DNA
ttcgtcatagttgtt

SEQ ID NO: 5728 - DNA, 15 bp, synthetic construct
  source 1..15: mol_type = other DNA
gcagcagtttccact

SEQ ID NO: 5729 - DNA, 15 bp, synthetic construct
  source 1..15: mol_type = other DNA
aatgatgtccaagaa

SEQ ID NO: 5730 - DNA, 15 bp, synthetic construct
  source 1..15: mol_type = other DNA
cctataaccagtccc

SEQ ID NO: 5731 - DNA, 15 bp, synthetic construct
  source 1..15: mol_type = other DNA
tcgatcactgggatt

SEQ ID NO: 5732 - DNA, 15 bp, synthetic construct
  source 1..15: mol_type = other DNA
cggccgagaactctt

SEQ ID NO: 5733 - DNA, 15 bp, synthetic construct
  source 1..15: mol_type = other DNA
tatcgaggctgatga

SEQ ID NO: 5734 - DNA, 15 bp, synthetic construct
  source 1..15: mol_type = other DNA
gctgagcattttctg

SEQ ID NO: 5735 - DNA, 15 bp, synthetic construct
  source 1..15: mol_type = other DNA
ccatctttacctaaa

SEQ ID NO: 5736 - DNA, 15 bp, synthetic construct
  source 1..15: mol_type = other DNA
ggatgaactatgtat

SEQ ID NO: 5737 - DNA, 15 bp, synthetic construct
  source 1..15: mol_type = other DNA
tctcagagacactta

SEQ ID NO: 5738 - DNA, 15 bp, synthetic construct
  source 1..15: mol_type = other DNA
atggactccagtcgg

SEQ ID NO: 5739 - DNA, 15 bp, synthetic construct
  source 1..15: mol_type = other DNA
agggttctgattttc

SEQ ID NO: 5740 - DNA, 15 bp, synthetic construct
  source 1..15: mol_type = other DNA
gagctccacaatgga

SEQ ID NO: 5741 - DNA, 15 bp, synthetic construct
  source 1..15: mol_type = other DNA
actatgtggtaagaa

SEQ ID NO: 5742 - DNA, 15 bp, synthetic construct
  source 1..15: mol_type = other DNA
tgatcggaacaggta

SEQ ID NO: 5743 - DNA, 15 bp, synthetic construct
  source 1..15: mol_type = other DNA
atcagaaaacaagtc

SEQ ID NO: 5744 - DNA, 15 bp, synthetic construct
  source 1..15: mol_type = other DNA
gccctgcttagaagc

SEQ ID NO: 5745 - DNA, 15 bp, synthetic construct
  source 1..15: mol_type = other DNA
tatgtcacatgcaca

SEQ ID NO: 5746 - DNA, 15 bp, synthetic construct
  source 1..15: mol_type = other DNA
gctcctacaacattt

SEQ ID NO: 5747 - DNA, 15 bp, synthetic construct
  source 1..15: mol_type = other DNA
ggaatccaacctaag

SEQ ID NO: 5748 - DNA, 15 bp, synthetic construct
  source 1..15: mol_type = other DNA
gagctctcctcaatg

SEQ ID NO: 5749 - DNA, 15 bp, synthetic construct
  source 1..15: mol_type = other DNA
gttgactgtatgcta

SEQ ID NO: 5750 - DNA, 15 bp, synthetic construct
  source 1..15: mol_type = other DNA
cgtcagcagtcgggt

SEQ ID NO: 5751 - DNA, 15 bp, synthetic construct
  source 1..15: mol_type = other DNA
gtagttgagcagtgg

SEQ ID NO: 5752 - DNA, 15 bp, synthetic construct
  source 1..15: mol_type = other DNA
gctgcagagcaagtt

SEQ ID NO: 5753 - DNA, 15 bp, synthetic construct
  source 1..15: mol_type = other DNA
cagccaccagctagt

SEQ ID NO: 5754 - DNA, 15 bp, synthetic construct
  source 1..15: mol_type = other DNA
aattcttgttctggt

SEQ ID NO: 5755 - DNA, 15 bp, synthetic construct
  source 1..15: mol_type = other DNA
ccagcacataagtaa

SEQ ID NO: 5756 - DNA, 15 bp, synthetic construct
  source 1..15: mol_type = other DNA
catttaatccttgct

SEQ ID NO: 5757 - DNA, 15 bp, synthetic construct
  source 1..15: mol_type = other DNA
ttcctaacctgatgg

SEQ ID NO: 5758 - DNA, 15 bp, synthetic construct
  source 1..15: mol_type = other DNA
tgtgcttccaagata

SEQ ID NO: 5759 - DNA, 15 bp, synthetic construct
  source 1..15: mol_type = other DNA
gatttgcttccaagg

SEQ ID NO: 5760 - DNA, 15 bp, synthetic construct
  source 1..15: mol_type = other DNA
tcttcgaagtccagc

SEQ ID NO: 5761 - DNA, 15 bp, synthetic construct
  source 1..15: mol_type = other DNA
tctgggaaggaatca

SEQ ID NO: 5762 - DNA, 15 bp, synthetic construct
  source 1..15: mol_type = other DNA
ccttggctccaaaca

SEQ ID NO: 5763 - DNA, 15 bp, synthetic construct
  source 1..15: mol_type = other DNA
aggccatcagagtta

SEQ ID NO: 5764 - DNA, 15 bp, synthetic construct
  source 1..15: mol_type = other DNA
gacaaagatggcaag

SEQ ID NO: 5765 - DNA, 15 bp, synthetic construct
  source 1..15: mol_type = other DNA
gatgaagaagggcag

SEQ ID NO: 5766 - DNA, 15 bp, synthetic construct
  source 1..15: mol_type = other DNA
aaataaaccaggccc

SEQ ID NO: 5767 - DNA, 15 bp, synthetic construct
  source 1..15: mol_type = other DNA
atgttgacaacagca

SEQ ID NO: 5768 - DNA, 15 bp, synthetic construct
  source 1..15: mol_type = other DNA
gaagagaggtctgaa

SEQ ID NO: 5769 - DNA, 15 bp, synthetic construct
  source 1..15: mol_type = other DNA
aggcagtgtagactt

SEQ ID NO: 5770 - DNA, 15 bp, synthetic construct
  source 1..15: mol_type = other DNA
cgtgctgtatatcag

SEQ ID NO: 5771 - DNA, 15 bp, synthetic construct
  source 1..15: mol_type = other DNA
agccacacagtgcaa

SEQ ID NO: 5772 - DNA, 15 bp, synthetic construct
  source 1..15: mol_type = other DNA
ggctctgtaggaccc

SEQ ID NO: 5773 - DNA, 15 bp, synthetic construct
  source 1..15: mol_type = other DNA
acagggaggaaaact

SEQ ID NO: 5774 - DNA, 15 bp, synthetic construct
  source 1..15: mol_type = other DNA
aatgtttggcatctt

SEQ ID NO: 5775 - DNA, 15 bp, synthetic construct
  source 1..15: mol_type = other DNA
tggaacccagatgaa

SEQ ID NO: 5776 - DNA, 15 bp, synthetic construct
  source 1..15: mol_type = other DNA
gaggcagctgtgaaa

SEQ ID NO: 5777 - DNA, 15 bp, synthetic construct
  source 1..15: mol_type = other DNA
ccacccatgaactgc

SEQ ID NO: 5778 - DNA, 15 bp, synthetic construct
  source 1..15: mol_type = other DNA
tcaatgctttcattg

SEQ ID NO: 5779 - DNA, 15 bp, synthetic construct
  source 1..15: mol_type = other DNA
tccaagcaaaaggca

SEQ ID NO: 5780 - DNA, 15 bp, synthetic construct
  source 1..15: mol_type = other DNA
gctgatacaagccag

SEQ ID NO: 5781 - DNA, 15 bp, synthetic construct
  source 1..15: mol_type = other DNA
gccatccagacacag

SEQ ID NO: 5782 - DNA, 15 bp, synthetic construct
  source 1..15: mol_type = other DNA
taaaaaaccagctgg

SEQ ID NO: 5783 - DNA, 15 bp, synthetic construct
  source 1..15: mol_type = other DNA
agtgtgtacaaggct

SEQ ID NO: 5784 - DNA, 15 bp, synthetic construct
  source 1..15: mol_type = other DNA
gatgatgtctatggc

SEQ ID NO: 5785 - DNA, 15 bp, synthetic construct
  source 1..15: mol_type = other DNA
tgttgactggttctg

SEQ ID NO: 5786 - DNA, 15 bp, synthetic construct
  source 1..15: mol_type = other DNA
tcaccacaaagctct

SEQ ID NO: 5787 - DNA, 15 bp, synthetic construct
  source 1..15: mol_type = other DNA
cttgtgtagatttgt

SEQ ID NO: 5788 - DNA, 15 bp, synthetic construct
  source 1..15: mol_type = other DNA
cctgcaagtccaatg

SEQ ID NO: 5789 - DNA, 15 bp, synthetic construct
  source 1..15: mol_type = other DNA
ggatggcgatgtcca

SEQ ID NO: 5790 - DNA, 15 bp, synthetic construct
  source 1..15: mol_type = other DNA
gtactacaaatccaa

SEQ ID NO: 5791 - DNA, 15 bp, synthetic construct
  source 1..15: mol_type = other DNA
tgaatagaaggagta

SEQ ID NO: 5792 - DNA, 15 bp, synthetic construct
  source 1..15: mol_type = other DNA
agttgcaaccacggc

SEQ ID NO: 5793 - DNA, 15 bp, synthetic construct
  source 1..15: mol_type = other DNA
tagtcaatcggcagt

SEQ ID NO: 5794 - DNA, 15 bp, synthetic construct
  source 1..15: mol_type = other DNA
gattcctcttttgct

SEQ ID NO: 5795 - DNA, 15 bp, synthetic construct
  source 1..15: mol_type = other DNA
acgtcccacaatgga

SEQ ID NO: 5796 - DNA, 15 bp, synthetic construct
  source 1..15: mol_type = other DNA
cacacatagctggag

SEQ ID NO: 5797 - DNA, 15 bp, synthetic construct
  source 1..15: mol_type = other DNA
gcagcggaaacgttc

SEQ ID NO: 5798 - DNA, 15 bp, synthetic construct
  source 1..15: mol_type = other DNA
gggcaacacgaagct

SEQ ID NO: 5799 - DNA, 15 bp, synthetic construct
  source 1..15: mol_type = other DNA
gtaacgaaggaatag

SEQ ID NO: 5800 - DNA, 15 bp, synthetic construct
  source 1..15: mol_type = other DNA
gtgacgccatcacct

SEQ ID NO: 5801 - DNA, 15 bp, synthetic construct
  source 1..15: mol_type = other DNA
cacctaccttacagc

SEQ ID NO: 5802 - DNA, 15 bp, synthetic construct
  source 1..15: mol_type = other DNA
ggtgagtgacatgag

SEQ ID NO: 5803 - DNA, 15 bp, synthetic construct
  source 1..15: mol_type = other DNA
gagaattaattcggt

SEQ ID NO: 5804 - DNA, 15 bp, synthetic construct
  source 1..15: mol_type = other DNA
ggctggtgtgtcttt

SEQ ID NO: 5805 - DNA, 15 bp, synthetic construct
  source 1..15: mol_type = other DNA
gaatctgtgtgatct

SEQ ID NO: 5806 - DNA, 15 bp, synthetic construct
  source 1..15: mol_type = other DNA
cagtccacctatgtg

SEQ ID NO: 5807 - DNA, 15 bp, synthetic construct
  source 1..15: mol_type = other DNA
aaggcgacttgaagc

SEQ ID NO: 5808 - DNA, 15 bp, synthetic construct
  source 1..15: mol_type = other DNA
ccttagcactgtgta

SEQ ID NO: 5809 - DNA, 15 bp, synthetic construct
  source 1..15: mol_type = other DNA
ctctgtgaggatctt

SEQ ID NO: 5810 - DNA, 15 bp, synthetic construct
  source 1..15: mol_type = other DNA
gggttttcaatgggc

SEQ ID NO: 5811 - DNA, 15 bp, synthetic construct
  source 1..15: mol_type = other DNA
gtaaatattgcagga

SEQ ID NO: 5812 - DNA, 15 bp, synthetic construct
  source 1..15: mol_type = other DNA
ccagagaggacattg

SEQ ID NO: 5813 - DNA, 15 bp, synthetic construct
  source 1..15: mol_type = other DNA
ggatccttggagaac

SEQ ID NO: 5814 - DNA, 15 bp, synthetic construct
  source 1..15: mol_type = other DNA
taagaatgagagaga

SEQ ID NO: 5815 - DNA, 15 bp, synthetic construct
  source 1..15: mol_type = other DNA
ggagagatgttggca

SEQ ID NO: 5816 - DNA, 15 bp, synthetic construct
  source 1..15: mol_type = other DNA
ttgtctcatgaattc

SEQ ID NO: 5817 - DNA, 15 bp, synthetic construct
  source 1..15: mol_type = other DNA
gtatttgagagttag

SEQ ID NO: 5818 - DNA, 15 bp, synthetic construct
  source 1..15: mol_type = other DNA
agtgttcaagtcttc

SEQ ID NO: 5819 - DNA, 15 bp, synthetic construct
  source 1..15: mol_type = other DNA
gtgctacacgcagct

SEQ ID NO: 5820 - DNA, 15 bp, synthetic construct
  source 1..15: mol_type = other DNA
ccttgatgtctcgca

SEQ ID NO: 5821 - DNA, 15 bp, synthetic construct
  source 1..15: mol_type = other DNA
aatttgtggctagac

SEQ ID NO: 5822 - DNA, 15 bp, synthetic construct
  source 1..15: mol_type = other DNA
cacgaatgacatctg

SEQ ID NO: 5823 - DNA, 15 bp, synthetic construct
  source 1..15: mol_type = other DNA
gaaagtatctggcca

SEQ ID NO: 5824 - DNA, 15 bp, synthetic construct
  source 1..15: mol_type = other DNA
gacgtgttctgaaaa

SEQ ID NO: 5825 - DNA, 15 bp, synthetic construct
  source 1..15: mol_type = other DNA
cttcatccctctcta

SEQ ID NO: 5826 - DNA, 15 bp, synthetic construct
  source 1..15: mol_type = other DNA
gaagaaagcctgtga

SEQ ID NO: 5827 - DNA, 15 bp, synthetic construct
  source 1..15: mol_type = other DNA
atcagcatagagtcc

SEQ ID NO: 5828 - DNA, 15 bp, synthetic construct
  source 1..15: mol_type = other DNA
atccactctcctatt

SEQ ID NO: 5829 - DNA, 15 bp, synthetic construct
  source 1..15: mol_type = other DNA
ttccctgtgccttat

SEQ ID NO: 5830 - DNA, 15 bp, synthetic construct
  source 1..15: mol_type = other DNA
ttgctttagggaaaa

SEQ ID NO: 5831 - DNA, 15 bp, synthetic construct
  source 1..15: mol_type = other DNA
ggcatcaccagaaaa

SEQ ID NO: 5832 - DNA, 15 bp, synthetic construct
  source 1..15: mol_type = other DNA
ctgaccctgttggta

SEQ ID NO: 5833 - DNA, 15 bp, synthetic construct
  source 1..15: mol_type = other DNA
tcaccgatgtctccc

SEQ ID NO: 5834 - DNA, 15 bp, synthetic construct
  source 1..15: mol_type = other DNA
gctctgagttagtgg

SEQ ID NO: 5835 - DNA, 15 bp, synthetic construct
  source 1..15: mol_type = other DNA
catccttcatataga

SEQ ID NO: 5836 - DNA, 15 bp, synthetic construct
  source 1..15: mol_type = other DNA
gagtcgtggtttcct

SEQ ID NO: 5837 - DNA, 15 bp, synthetic construct
  source 1..15: mol_type = other DNA
ccctagaactatact

SEQ ID NO: 5838 - DNA, 15 bp, synthetic construct
  source 1..15: mol_type = other DNA
attggtcagaaacag

SEQ ID NO: 5839 - DNA, 15 bp, synthetic construct
  source 1..15: mol_type = other DNA
gacgtcatcatagaa

SEQ ID NO: 5840 - DNA, 15 bp, synthetic construct
  source 1..15: mol_type = other DNA
aggcagaacagaagg

SEQ ID NO: 5841 - DNA, 15 bp, synthetic construct
  source 1..15: mol_type = other DNA
gagttcggcacttag

SEQ ID NO: 5842 - DNA, 15 bp, synthetic construct
  source 1..15: mol_type = other DNA
agactggaatggagt

SEQ ID NO: 5843 - DNA, 15 bp, synthetic construct
  source 1..15: mol_type = other DNA
tatggaatcagaacc

SEQ ID NO: 5844 - DNA, 15 bp, synthetic construct
  source 1..15: mol_type = other DNA
gatttagaggtgacg

SEQ ID NO: 5845 - DNA, 15 bp, synthetic construct
  source 1..15: mol_type = other DNA
gacagtgggcacaaa

SEQ ID NO: 5846 - DNA, 15 bp, synthetic construct
  source 1..15: mol_type = other DNA
gctatgtctctctgg

SEQ ID NO: 5847 - DNA, 15 bp, synthetic construct
  source 1..15: mol_type = other DNA
cagaaccacagactg

SEQ ID NO: 5848 - DNA, 15 bp, synthetic construct
  source 1..15: mol_type = other DNA
ggcaaggttggaaga

SEQ ID NO: 5849 - DNA, 15 bp, synthetic construct
  source 1..15: mol_type = other DNA
atcccgaggctcata

SEQ ID NO: 5850 - DNA, 15 bp, synthetic construct
  source 1..15: mol_type = other DNA
ttctaggcacatatt

SEQ ID NO: 5851 - DNA, 15 bp, synthetic construct
  source 1..15: mol_type = other DNA
ttccagctatgtcag

SEQ ID NO: 5852 - DNA, 15 bp, synthetic construct
  source 1..15: mol_type = other DNA
taagtttgtacccaa

SEQ ID NO: 5853 - DNA, 15 bp, synthetic construct
  source 1..15: mol_type = other DNA
tttccatcatctctt

SEQ ID NO: 5854 - DNA, 15 bp, synthetic construct
  source 1..15: mol_type = other DNA
ttgacaatcctccag

SEQ ID NO: 5855 - DNA, 15 bp, synthetic construct
  source 1..15: mol_type = other DNA
ggtcagctatgacca

SEQ ID NO: 5856 - DNA, 15 bp, synthetic construct
  source 1..15: mol_type = other DNA
cccaaagctgagtgt

SEQ ID NO: 5857 - DNA, 15 bp, synthetic construct
  source 1..15: mol_type = other DNA
ccagtgctcttgttg

SEQ ID NO: 5858 - DNA, 15 bp, synthetic construct
  source 1..15: mol_type = other DNA
atggaaggtgcgttc

SEQ ID NO: 5859 - DNA, 15 bp, synthetic construct
  source 1..15: mol_type = other DNA
ggtcttcatggtggc

SEQ ID NO: 5860 - DNA, 15 bp, synthetic construct
  source 1..15: mol_type = other DNA
aactacaggcatccc

SEQ ID NO: 5861 - DNA, 15 bp, synthetic construct
  source 1..15: mol_type = other DNA
tgcccacagcacaaa

SEQ ID NO: 5862 - DNA, 15 bp, synthetic construct
  source 1..15: mol_type = other DNA
acgataccggcaaag

SEQ ID NO: 5863 - DNA, 15 bp, synthetic construct
  source 1..15: mol_type = other DNA
cagcttcaggtactc

SEQ ID NO: 5864 - DNA, 15 bp, synthetic construct
  source 1..15: mol_type = other DNA
tccatgtaattgaac

SEQ ID NO: 5865 - DNA, 15 bp, synthetic construct
  source 1..15: mol_type = other DNA
agatgacagatagct

SEQ ID NO: 5866 - DNA, 15 bp, synthetic construct
  source 1..15: mol_type = other DNA
aggatgagctcaaaa

SEQ ID NO: 5867 - DNA, 15 bp, synthetic construct
  source 1..15: mol_type = other DNA
ccttgtagccaatga

SEQ ID NO: 5868 - DNA, 15 bp, synthetic construct
  source 1..15: mol_type = other DNA
ccatagtgaggttgc

SEQ ID NO: 5869 - DNA, 15 bp, synthetic construct
  source 1..15: mol_type = other DNA
gccacacccggagaa

SEQ ID NO: 5870 - DNA, 15 bp, synthetic construct
  source 1..15: mol_type = other DNA
ccttcacaatagcca

SEQ ID NO: 5871 - DNA, 15 bp, synthetic construct
  source 1..15: mol_type = other DNA
ccgtgaactcctcat

SEQ ID NO: 5872 - DNA, 15 bp, synthetic construct
  source 1..15: mol_type = other DNA
ccctccaagctatcg

SEQ ID NO: 5873 - DNA, 15 bp, synthetic construct
  source 1..15: mol_type = other DNA
cttaatgtgcccgtc

SEQ ID NO: 5874 - DNA, 15 bp, synthetic construct
  source 1..15: mol_type = other DNA
ccaaaacactcaggg

SEQ ID NO: 5875 - DNA, 15 bp, synthetic construct
  source 1..15: mol_type = other DNA
ccacgatgacttcct

SEQ ID NO: 5876 - DNA, 15 bp, synthetic construct
  source 1..15: mol_type = other DNA
gagaagttgttgagg

SEQ ID NO: 5877 - DNA, 15 bp, synthetic construct
  source 1..15: mol_type = other DNA
gtacaccacgttctt

SEQ ID NO: 5878 - DNA, 15 bp, synthetic construct
  source 1..15: mol_type = other DNA
gaggatgagctcaaa

SEQ ID NO: 5879 - DNA, 15 bp, synthetic construct
  source 1..15: mol_type = other DNA
agggctgacacaatc

SEQ ID NO: 5880 - DNA, 15 bp, synthetic construct
  source 1..15: mol_type = other DNA
gcgcatagctgcaga

SEQ ID NO: 5881 - DNA, 15 bp, synthetic construct
  source 1..15: mol_type = other DNA
cagcgtggcttctct

SEQ ID NO: 5882 - DNA, 15 bp, synthetic construct
  source 1..15: mol_type = other DNA
caacaatgctctggg

SEQ ID NO: 5883 - DNA, 15 bp, synthetic construct
  source 1..15: mol_type = other DNA
tagagggtctcgtgg

SEQ ID NO: 5884 - DNA, 15 bp, synthetic construct
  source 1..15: mol_type = other DNA
tctcttcagtgtttt

SEQ ID NO: 5885 - DNA, 15 bp, synthetic construct
  source 1..15: mol_type = other DNA
cacttcagcaccctt

SEQ ID NO: 5886 - DNA, 15 bp, synthetic construct
  source 1..15: mol_type = other DNA
gcgttggcgttttcc

SEQ ID NO: 5887 - DNA, 15 bp, synthetic construct
  source 1..15: mol_type = other DNA
gagagaagagtcctc

SEQ ID NO: 5888 - DNA, 15 bp, synthetic construct
  source 1..15: mol_type = other DNA
tccaagagctgaagt

SEQ ID NO: 5889 - DNA, 15 bp, synthetic construct
  source 1..15: mol_type = other DNA
tcctgatttgaatac

SEQ ID NO: 5890 - DNA, 15 bp, synthetic construct
  source 1..15: mol_type = other DNA
tccatgagatcatgt

SEQ ID NO: 5891 - DNA, 15 bp, synthetic construct
  source 1..15: mol_type = other DNA
acacatctatttcag

SEQ ID NO: 5892 - DNA, 15 bp, synthetic construct
  source 1..15: mol_type = other DNA
cttattttgccggct

SEQ ID NO: 5893 - DNA, 15 bp, synthetic construct
  source 1..15: mol_type = other DNA
ccagccaatattctc

SEQ ID NO: 5894 - DNA, 15 bp, synthetic construct
  source 1..15: mol_type = other DNA
tctctttcctctttt

SEQ ID NO: 5895 - DNA, 15 bp, synthetic construct
  source 1..15: mol_type = other DNA
aacataacaaggagt

SEQ ID NO: 5896 - DNA, 15 bp, synthetic construct
  source 1..15: mol_type = other DNA
tcacgtcgctgaata

SEQ ID NO: 5897 - DNA, 15 bp, synthetic construct
  source 1..15: mol_type = other DNA
gcacatagcgttgct

SEQ ID NO: 5898 - DNA, 15 bp, synthetic construct
  source 1..15: mol_type = other DNA
atgttaacgtgtaga

SEQ ID NO: 5899 - DNA, 15 bp, synthetic construct
  source 1..15: mol_type = other DNA
tgcttggatacagga

SEQ ID NO: 5900 - DNA, 15 bp, synthetic construct
  source 1..15: mol_type = other DNA
tcagttaacttccgc

SEQ ID NO: 5901 - DNA, 15 bp, synthetic construct
  source 1..15: mol_type = other DNA
ctgcaccgagtcatc

SEQ ID NO: 5902 - DNA, 15 bp, synthetic construct
  source 1..15: mol_type = other DNA
gctgatttgttcttc

SEQ ID NO: 5903 - DNA, 15 bp, synthetic construct
  source 1..15: mol_type = other DNA
tgtgagaacgtgaga

SEQ ID NO: 5904 - DNA, 15 bp, synthetic construct
  source 1..15: mol_type = other DNA
ttctatcatcacagc

SEQ ID NO: 5905 - DNA, 15 bp, synthetic construct
  source 1..15: mol_type = other DNA
tgtcgttgtctccat

SEQ ID NO: 5906 - DNA, 15 bp, synthetic construct
  source 1..15: mol_type = other DNA
actgaattattcacc

SEQ ID NO: 5907 - DNA, 15 bp, synthetic construct
  source 1..15: mol_type = other DNA
agcctcgggttcatc

SEQ ID NO: 5908 - DNA, 15 bp, synthetic construct
  source 1..15: mol_type = other DNA
atgtgcttgtcttcc

SEQ ID NO: 5909 - DNA, 15 bp, synthetic construct
  source 1..15: mol_type = other DNA
gcttggatactaaca

SEQ ID NO: 5910 - DNA, 15 bp, synthetic construct
  source 1..15: mol_type = other DNA
gggcaaacacacgtc

SEQ ID NO: 5911 - DNA, 15 bp, synthetic construct
  source 1..15: mol_type = other DNA
atcctacagtgtcag

SEQ ID NO: 5912 - DNA, 15 bp, synthetic construct
  source 1..15: mol_type = other DNA
agcagcgcaactgtt

SEQ ID NO: 5913 - DNA, 15 bp, synthetic construct
  source 1..15: mol_type = other DNA
agcgtaggcagcaac

SEQ ID NO: 5914 - DNA, 15 bp, synthetic construct
  source 1..15: mol_type = other DNA
atccttgtagaagaa

SEQ ID NO: 5915 - DNA, 15 bp, synthetic construct
  source 1..15: mol_type = other DNA
caaatgtgatccttc

SEQ ID NO: 5916 - DNA, 15 bp, synthetic construct
  source 1..15: mol_type = other DNA
agttggtcatggatg

SEQ ID NO: 5917 - DNA, 15 bp, synthetic construct
  source 1..15: mol_type = other DNA
ggcggcaaagaatag

SEQ ID NO: 5918 - DNA, 15 bp, synthetic construct
  source 1..15: mol_type = other DNA
gcatctaccgaacca

SEQ ID NO: 5919 - DNA, 15 bp, synthetic construct
  source 1..15: mol_type = other DNA
ccatcttttcatgga

SEQ ID NO: 5920 - DNA, 15 bp, synthetic construct
  source 1..15: mol_type = other DNA
ttgttggctgctttc

SEQ ID NO: 5921 - DNA, 15 bp, synthetic construct
  source 1..15: mol_type = other DNA
tcttgacttcgtgca

SEQ ID NO: 5922 - DNA, 15 bp, synthetic construct
  source 1..15: mol_type = other DNA
tactgagaaccctgt

SEQ ID NO: 5923 - DNA, 15 bp, synthetic construct
  source 1..15: mol_type = other DNA
tcttaggatgcggag

SEQ ID NO: 5924 - DNA, 15 bp, synthetic construct
  source 1..15: mol_type = other DNA
catgtgcccgtactg

SEQ ID NO: 5925 - DNA, 15 bp, synthetic construct
  source 1..15: mol_type = other DNA
ggcctccatattgtt

SEQ ID NO: 5926 - DNA, 15 bp, synthetic construct
  source 1..15: mol_type = other DNA
tggaaaagctctcta

SEQ ID NO: 5927 - DNA, 15 bp, synthetic construct
  source 1..15: mol_type = other DNA
ccagagatgagaagt

SEQ ID NO: 5928 - DNA, 15 bp, synthetic construct
  source 1..15: mol_type = other DNA
acttttgctcctgaa

SEQ ID NO: 5929 - DNA, 15 bp, synthetic construct
  source 1..15: mol_type = other DNA
gtcattctatcaagc

SEQ ID NO: 5930 - DNA, 15 bp, synthetic construct
  source 1..15: mol_type = other DNA
tgagtttctgtggaa

SEQ ID NO: 5931 - DNA, 15 bp, synthetic construct
  source 1..15: mol_type = other DNA
aatatggagctaagt

SEQ ID NO: 5932 - DNA, 15 bp, synthetic construct
  source 1..15: mol_type = other DNA
gctccttgcagaacc

SEQ ID NO: 5933 - DNA, 15 bp, synthetic construct
  source 1..15: mol_type = other DNA
gatgagttacaggac

SEQ ID NO: 5934 - DNA, 15 bp, synthetic construct
  source 1..15: mol_type = other DNA
gtgcctcaatccatt

SEQ ID NO: 5935 - DNA, 15 bp, synthetic construct
  source 1..15: mol_type = other DNA
ttaggcactgactga

SEQ ID NO: 5936 - DNA, 15 bp, synthetic construct
  source 1..15: mol_type = other DNA
ttcacttctaactct

SEQ ID NO: 5937 - DNA, 15 bp, synthetic construct
  source 1..15: mol_type = other DNA
tctgtgttcgccaag

SEQ ID NO: 5938 - DNA, 15 bp, synthetic construct
  source 1..15: mol_type = other DNA
atcatcagggtagat

SEQ ID NO: 5939 - DNA, 15 bp, synthetic construct
  source 1..15: mol_type = other DNA
cctaggtcttccttt

SEQ ID NO: 5940 - DNA, 15 bp, synthetic construct
  source 1..15: mol_type = other DNA
ctcttgtttggattc

SEQ ID NO: 5941 - DNA, 15 bp, synthetic construct
  source 1..15: mol_type = other DNA
atgcgtagccttggg

SEQ ID NO: 5942 - DNA, 15 bp, synthetic construct
  source 1..15: mol_type = other DNA
acacatctacgagat

SEQ ID NO: 5943 - DNA, 15 bp, synthetic construct
  source 1..15: mol_type = other DNA
ccctaggtgtgtctt

SEQ ID NO: 5944 - DNA, 15 bp, synthetic construct
  source 1..15: mol_type = other DNA
tttttgatgtgtagc

SEQ ID NO: 5945 - DNA, 15 bp, synthetic construct
  source 1..15: mol_type = other DNA
gttggaatagaaact

SEQ ID NO: 5946 - DNA, 15 bp, synthetic construct
  source 1..15: mol_type = other DNA
agttggaatagaaac

SEQ ID NO: 5947 - DNA, 15 bp, synthetic construct
  source 1..15: mol_type = other DNA
cctcctagcatgagt

SEQ ID NO: 5948 - DNA, 15 bp, synthetic construct
  source 1..15: mol_type = other DNA
ccagagtggacgatg

SEQ ID NO: 5949 - DNA, 15 bp, synthetic construct
  source 1..15: mol_type = other DNA
agcaggttcttgact

SEQ ID NO: 5950 - DNA, 15 bp, synthetic construct
  source 1..15: mol_type = other DNA
tgggcgtcttgtata

SEQ ID NO: 5951 - DNA, 15 bp, synthetic construct
  source 1..15: mol_type = other DNA
cttttgtttggattc

SEQ ID NO: 5952 - DNA, 15 bp, synthetic construct
  source 1..15: mol_type = other DNA
gttcgttttgataca

SEQ ID NO: 5953 - DNA, 15 bp, synthetic construct
  source 1..15: mol_type = other DNA
tttgtttggattctg

SEQ ID NO: 5954 - DNA, 15 bp, synthetic construct
  source 1..15: mol_type = other DNA
attcctctttcagtt

SEQ ID NO: 5955 - DNA, 15 bp, synthetic construct
  source 1..15: mol_type = other DNA
aacagcataatgttc

SEQ ID NO: 5956 - DNA, 15 bp, synthetic construct
  source 1..15: mol_type = other DNA
gctgcccacgtaaat

SEQ ID NO: 5957 - DNA, 15 bp, synthetic construct
  source 1..15: mol_type = other DNA
tgcagcaaagacgtc

SEQ ID NO: 5958 - DNA, 15 bp, synthetic construct
  source 1..15: mol_type = other DNA
tagatgttactcttg

SEQ ID NO: 5959 - DNA, 15 bp, synthetic construct
  source 1..15: mol_type = other DNA
tttctcagatgtttc

SEQ ID NO: 5960 - DNA, 15 bp, synthetic construct
  source 1..15: mol_type = other DNA
cagggcagaaccgat

SEQ ID NO: 5961 - DNA, 15 bp, synthetic construct
  source 1..15: mol_type = other DNA
agcaaggtgcatgtt

SEQ ID NO: 5962 - DNA, 15 bp, synthetic construct
  source 1..15: mol_type = other DNA
agctggaaatgagag

SEQ ID NO: 5963 - DNA, 15 bp, synthetic construct
  source 1..15: mol_type = other DNA
caccctctaaatggc

SEQ ID NO: 5964 - DNA, 15 bp, synthetic construct
  source 1..15: mol_type = other DNA
aggagaagagatgca

SEQ ID NO: 5965 - DNA, 15 bp, synthetic construct
  source 1..15: mol_type = other DNA
gcactggtgatagtt

SEQ ID NO: 5966 - DNA, 15 bp, synthetic construct
  source 1..15: mol_type = other DNA
actccaaagagacat

SEQ ID NO: 5967 - DNA, 15 bp, synthetic construct
  source 1..15: mol_type = other DNA
agctgaaaccgtggg

SEQ ID NO: 5968 - DNA, 15 bp, synthetic construct
  source 1..15: mol_type = other DNA
ggcttcatacccaaa

SEQ ID NO: 5969 - DNA, 15 bp, synthetic construct
  source 1..15: mol_type = other DNA
aaggcacaaagcaat

SEQ ID NO: 5970 - DNA, 15 bp, synthetic construct
  source 1..15: mol_type = other DNA
taaatgagctagaag

SEQ ID NO: 5971 - DNA, 15 bp, synthetic construct
  source 1..15: mol_type = other DNA
cttggttactaggcc

SEQ ID NO: 5972 - DNA, 15 bp, synthetic construct
  source 1..15: mol_type = other DNA
atgcccgactgcatc

SEQ ID NO: 5973 - DNA, 15 bp, synthetic construct
  source 1..15: mol_type = other DNA
agggacgattccaag

SEQ ID NO: 5974 - DNA, 15 bp, synthetic construct
  source 1..15: mol_type = other DNA
gggaacagaaagttc

SEQ ID NO: 5975 - DNA, 15 bp, synthetic construct
  source 1..15: mol_type = other DNA
ctgttgccatcatgg

SEQ ID NO: 5976 - DNA, 15 bp, synthetic construct
  source 1..15: mol_type = other DNA
ggcgactagcaggtg

SEQ ID NO: 5977 - DNA, 15 bp, synthetic construct
  source 1..15: mol_type = other DNA
tccctctgcttctaa

SEQ ID NO: 5978 - DNA, 15 bp, synthetic construct
  source 1..15: mol_type = other DNA
ggagtgggtgaattg

SEQ ID NO: 5979 - DNA, 15 bp, synthetic construct
  source 1..15: mol_type = other DNA
ctgtcgatctctgct

SEQ ID NO: 5980 - DNA, 15 bp, synthetic construct
  source 1..15: mol_type = other DNA
ttgggctgcaactat

SEQ ID NO: 5981 - DNA, 15 bp, synthetic construct
  source 1..15: mol_type = other DNA
gcaggttattcagct

SEQ ID NO: 5982 - DNA, 15 bp, synthetic construct
  source 1..15: mol_type = other DNA
tctacactgacaaga

SEQ ID NO: 5983 - DNA, 15 bp, synthetic construct
  source 1..15: mol_type = other DNA
cacgtcttctggacc

SEQ ID NO: 5984 - DNA, 15 bp, synthetic construct
  source 1..15: mol_type = other DNA
tctcgcactctatcg

SEQ ID NO: 5985 - DNA, 15 bp, synthetic construct
  source 1..15: mol_type = other DNA
ggtcatcaaatttgc

SEQ ID NO: 5986 - DNA, 15 bp, synthetic construct
  source 1..15: mol_type = other DNA
caggattcatagagc

SEQ ID NO: 5987 - DNA, 15 bp, synthetic construct
  source 1..15: mol_type = other DNA
ggagaacgccatcca

SEQ ID NO: 5988 - DNA, 15 bp, synthetic construct
  source 1..15: mol_type = other DNA
gggcacacattcagg

SEQ ID NO: 5989 - DNA, 15 bp, synthetic construct
  source 1..15: mol_type = other DNA
gaacaatatttgctc

SEQ ID NO: 5990 - DNA, 15 bp, synthetic construct
  source 1..15: mol_type = other DNA
gcacatggcaaaggt

SEQ ID NO: 5991 - DNA, 15 bp, synthetic construct
  source 1..15: mol_type = other DNA
ggtcaacaatggcca

SEQ ID NO: 5992 - DNA, 15 bp, synthetic construct
  source 1..15: mol_type = other DNA
cagcaaagccaaagg

SEQ ID NO: 5993 - DNA, 15 bp, synthetic construct
  source 1..15: mol_type = other DNA
cccgaaacaaaaagc

SEQ ID NO: 5994 - DNA, 15 bp, synthetic construct
  source 1..15: mol_type = other DNA
gggtaggtagcaaag

SEQ ID NO: 5995 - DNA, 15 bp, synthetic construct
  source 1..15: mol_type = other DNA
taatacagcccaaaa

SEQ ID NO: 5996 - DNA, 15 bp, synthetic construct
  source 1..15: mol_type = other DNA
attcatgaccaccgc

SEQ ID NO: 5997 - DNA, 15 bp, synthetic construct
  source 1..15: mol_type = other DNA
atttattgggtagcc

SEQ ID NO: 5998 - DNA, 15 bp, synthetic construct
  source 1..15: mol_type = other DNA
tgggttcatggagca

SEQ ID NO: 5999 - DNA, 15 bp, synthetic construct
  source 1..15: mol_type = other DNA
ctcaccagaaataaa

SEQ ID NO: 6000 - DNA, 15 bp, synthetic construct
  source 1..15: mol_type = other DNA
aacgccagcgcgatc

SEQ ID NO: 6001 - DNA, 15 bp, synthetic construct
  source 1..15: mol_type = other DNA
atacgtgcctttgat

SEQ ID NO: 6002 - DNA, 15 bp, synthetic construct
  source 1..15: mol_type = other DNA
agaggaccggttgtg

SEQ ID NO: 6003 - DNA, 15 bp, synthetic construct
  source 1..15: mol_type = other DNA
agcggctcttttgaa

SEQ ID NO: 6004 - DNA, 15 bp, synthetic construct
  source 1..15: mol_type = other DNA
tgcaaaggagtcggg

SEQ ID NO: 6005 - DNA, 15 bp, synthetic construct
  source 1..15: mol_type = other DNA
ctgctgccagattaa

SEQ ID NO: 6006 - DNA, 15 bp, synthetic construct
  source 1..15: mol_type = other DNA
tactgaagacctgac

SEQ ID NO: 6007 - DNA, 15 bp, synthetic construct
  source 1..15: mol_type = other DNA
catagccttcaatgt

SEQ ID NO: 6008 - DNA, 15 bp, synthetic construct
  source 1..15: mol_type = other DNA
ttccgaagacgacaa

SEQ ID NO: 6009 - DNA, 15 bp, synthetic construct
  source 1..15: mol_type = other DNA
gggaatactcagcag

SEQ ID NO: 6010 - DNA, 15 bp, synthetic construct
  source 1..15: mol_type = other DNA
gtcgtctagcagaga

SEQ ID NO: 6011 - DNA, 15 bp, synthetic construct
  source 1..15: mol_type = other DNA
agagggttctctccg

SEQ ID NO: 6012 - DNA, 15 bp, synthetic construct
  source 1..15: mol_type = other DNA
acaagctgtctctct

SEQ ID NO: 6013 - DNA, 15 bp, synthetic construct
  source 1..15: mol_type = other DNA
tggctgtacatccgg

SEQ ID NO: 6014 - DNA, 15 bp, synthetic construct
  source 1..15: mol_type = other DNA
ggtgaaggatcgcca

SEQ ID NO: 6015 - DNA, 15 bp, synthetic construct
  source 1..15: mol_type = other DNA
ccaaactcttgagag

SEQ ID NO: 6016 - DNA, 15 bp, synthetic construct
  source 1..15: mol_type = other DNA
gctccatagtgacac

SEQ ID NO: 6017 - DNA, 15 bp, synthetic construct
  source 1..15: mol_type = other DNA
ccattcaaaacacag

SEQ ID NO: 6018 - DNA, 15 bp, synthetic construct
  source 1..15: mol_type = other DNA
ggtccttgtgacttt

SEQ ID NO: 6019 - DNA, 15 bp, synthetic construct
  source 1..15: mol_type = other DNA
gaagcgtcttgagca

SEQ ID NO: 6020 - DNA, 15 bp, synthetic construct
  source 1..15: mol_type = other DNA
tcgcagccaaaggga

SEQ ID NO: 6021 - DNA, 15 bp, synthetic construct
  source 1..15: mol_type = other DNA
gaaaaccagatcagg

SEQ ID NO: 6022 - DNA, 15 bp, synthetic construct
  source 1..15: mol_type = other DNA
ctctcgccttctagc

SEQ ID NO: 6023 - DNA, 15 bp, synthetic construct
  source 1..15: mol_type = other DNA
tcagattaccaagtt

SEQ ID NO: 6024 - DNA, 15 bp, synthetic construct
  source 1..15: mol_type = other DNA
tgctgaagagtagca

SEQ ID NO: 6025 - DNA, 15 bp, synthetic construct
  source 1..15: mol_type = other DNA
atccaggagtactga

SEQ ID NO: 6026 - DNA, 15 bp, synthetic construct
  source 1..15: mol_type = other DNA
gcccatttcgctttt

SEQ ID NO: 6027 - DNA, 15 bp, synthetic construct
  source 1..15: mol_type = other DNA
gtgaaagatgggtcc

SEQ ID NO: 6028 - DNA, 15 bp, synthetic construct
  source 1..15: mol_type = other DNA
atttcttctgtgatg

SEQ ID NO: 6029 - DNA, 15 bp, synthetic construct
  source 1..15: mol_type = other DNA
aagggactgtcatta

SEQ ID NO: 6030 - DNA, 15 bp, synthetic construct
  source 1..15: mol_type = other DNA
tagctgagtgtttct

SEQ ID NO: 6031 - DNA, 15 bp, synthetic construct
  source 1..15: mol_type = other DNA
cgcttgcttttccca

SEQ ID NO: 6032 - DNA, 15 bp, synthetic construct
  source 1..15: mol_type = other DNA
aggtgggttaaggta

SEQ ID NO: 6033 - DNA, 15 bp, synthetic construct
  source 1..15: mol_type = other DNA
aggttgtccatgcaa

SEQ ID NO: 6034 - DNA, 15 bp, synthetic construct
  source 1..15: mol_type = other DNA
tatccttggcagata

SEQ ID NO: 6035 - DNA, 15 bp, synthetic construct
  source 1..15: mol_type = other DNA
acatgtggtagcttt

SEQ ID NO: 6036 - DNA, 15 bp, synthetic construct
  source 1..15: mol_type = other DNA
cctagtctgtccact

SEQ ID NO: 6037 - DNA, 15 bp, synthetic construct
  source 1..15: mol_type = other DNA
gctccaataatccct

SEQ ID NO: 6038 - DNA, 15 bp, synthetic construct
  source 1..15: mol_type = other DNA
cgagcaagtccgaaa

SEQ ID NO: 6039 - DNA, 15 bp, synthetic construct
  source 1..15: mol_type = other DNA
ttctcaatactgtag

SEQ ID NO: 6040 - DNA, 15 bp, synthetic construct
  source 1..15: mol_type = other DNA
tgacacttctctttg

SEQ ID NO: 6041 - DNA, 15 bp, synthetic construct
  source 1..15: mol_type = other DNA
tgctgtgttcactgt

SEQ ID NO: 6042 - DNA, 15 bp, synthetic construct
  source 1..15: mol_type = other DNA
tgtcagtggagtgtt

SEQ ID NO: 6043 - DNA, 15 bp, synthetic construct
  source 1..15: mol_type = other DNA
tccacatcttgaatt

SEQ ID NO: 6044 - DNA, 15 bp, synthetic construct
  source 1..15: mol_type = other DNA
gagtgatgataaaag

SEQ ID NO: 6045 - DNA, 15 bp, synthetic construct
  source 1..15: mol_type = other DNA
agaatcggttcccag

SEQ ID NO: 6046 - DNA, 15 bp, synthetic construct
  source 1..15: mol_type = other DNA
acgctcgtaaaacac

SEQ ID NO: 6047 - DNA, 15 bp, synthetic construct
  source 1..15: mol_type = other DNA
aacacaccgtagtgg

SEQ ID NO: 6048 - DNA, 15 bp, synthetic construct
  source 1..15: mol_type = other DNA
tggtcaaagtcttct

SEQ ID NO: 6049 - DNA, 15 bp, synthetic construct
  source 1..15: mol_type = other DNA
ctgaaggtgtctctg

SEQ ID NO: 6050 - DNA, 15 bp, synthetic construct
  source 1..15: mol_type = other DNA
ccaaggtagggtgaa

SEQ ID NO: 6051 - DNA, 15 bp, synthetic construct
  source 1..15: mol_type = other DNA
ggcgtttcgatcaga

SEQ ID NO: 6052 - DNA, 15 bp, synthetic construct
  source 1..15: mol_type = other DNA
tcattttctgaaacg

SEQ ID NO: 6053 - DNA, 15 bp, synthetic construct
  source 1..15: mol_type = other DNA
ctccagggaatgatt

SEQ ID NO: 6054 - DNA, 15 bp, synthetic construct
  source 1..15: mol_type = other DNA
ttgaagtacagctcc

SEQ ID NO: 6055 - DNA, 15 bp, synthetic construct
  source 1..15: mol_type = other DNA
ggaccaggttgatat

SEQ ID NO: 6056 - DNA, 15 bp, synthetic construct
  source 1..15: mol_type = other DNA
ctccacatagtcttt

SEQ ID NO: 6057 - DNA, 15 bp, synthetic construct
  source 1..15: mol_type = other DNA
ctggaaaatctcctc

SEQ ID NO: 6058 - DNA, 15 bp, synthetic construct
  source 1..15: mol_type = other DNA
gacagacatgtggaa

SEQ ID NO: 6059 - DNA, 15 bp, synthetic construct
  source 1..15: mol_type = other DNA
aatgctttgtttcag

SEQ ID NO: 6060 - DNA, 15 bp, synthetic construct
  source 1..15: mol_type = other DNA
ttctgcaatgcacca

SEQ ID NO: 6061 - DNA, 15 bp, synthetic construct
  source 1..15: mol_type = other DNA
tctagagcattttca

SEQ ID NO: 6062 - DNA, 15 bp, synthetic construct
  source 1..15: mol_type = other DNA
aaactaacctgtaag

SEQ ID NO: 6063 - DNA, 15 bp, synthetic construct
  source 1..15: mol_type = other DNA
cttctttgctcaatt

SEQ ID NO: 6064 - DNA, 15 bp, synthetic construct
  source 1..15: mol_type = other DNA
cctgagtttagatcc

SEQ ID NO: 6065 - DNA, 15 bp, synthetic construct
  source 1..15: mol_type = other DNA
tttggatttctgtga

SEQ ID NO: 6066 - DNA, 15 bp, synthetic construct
  source 1..15: mol_type = other DNA
gatagagtttgccga

SEQ ID NO: 6067 - DNA, 15 bp, synthetic construct
  source 1..15: mol_type = other DNA
ggagacattcagtat

SEQ ID NO: 6068 - DNA, 15 bp, synthetic construct
  source 1..15: mol_type = other DNA
agcaccgacgtgaag

SEQ ID NO: 6069 - DNA, 15 bp, synthetic construct
  source 1..15: mol_type = other DNA
gggcggcaatacgat

SEQ ID NO: 6070 - DNA, 15 bp, synthetic construct
  source 1..15: mol_type = other DNA
ctgacatgaggttgg

SEQ ID NO: 6071 - DNA, 15 bp, synthetic construct
  source 1..15: mol_type = other DNA
cagtcgtgacagttc

SEQ ID NO: 6072 - DNA, 15 bp, synthetic construct
  source 1..15: mol_type = other DNA
cttgatctccttgcg

SEQ ID NO: 6073 - DNA, 15 bp, synthetic construct
  source 1..15: mol_type = other DNA
tcttctgcattgggc

SEQ ID NO: 6074 - DNA, 15 bp, synthetic construct
  source 1..15: mol_type = other DNA
aagctagacatgtgt

SEQ ID NO: 6075 - DNA, 15 bp, synthetic construct
  source 1..15: mol_type = other DNA
tctgaaaacttccaa

SEQ ID NO: 6076 - DNA, 15 bp, synthetic construct
  source 1..15: mol_type = other DNA
atcaggtcctttttc

SEQ ID NO: 6077 - DNA, 15 bp, synthetic construct
  source 1..15: mol_type = other DNA
ttagagcaagtgcag

SEQ ID NO: 6078 - DNA, 15 bp, synthetic construct
  source 1..15: mol_type = other DNA
ggattcatttgattg

SEQ ID NO: 6079 - DNA, 15 bp, synthetic construct
  source 1..15: mol_type = other DNA
ctgaatcatctcatt

SEQ ID NO: 6080 - DNA, 15 bp, synthetic construct
  source 1..15: mol_type = other DNA
cccaccaggtatgca

SEQ ID NO: 6081 - DNA, 15 bp, synthetic construct
  source 1..15: mol_type = other DNA
ttctaaagcagcttg

SEQ ID NO: 6082 - DNA, 15 bp, synthetic construct
  source 1..15: mol_type = other DNA
caattctgttcactc

SEQ ID NO: 6083 - DNA, 15 bp, synthetic construct
  source 1..15: mol_type = other DNA
cggcctgatgctctg

SEQ ID NO: 6084 - DNA, 15 bp, synthetic construct
  source 1..15: mol_type = other DNA
ggcctctcttgcgga

SEQ ID NO: 6085 - DNA, 15 bp, synthetic construct
  source 1..15: mol_type = other DNA
cctgccaaatcttcg

SEQ ID NO: 6086 - DNA, 15 bp, synthetic construct
  source 1..15: mol_type = other DNA
ggtactaggtccatc

SEQ ID NO: 6087 - DNA, 15 bp, synthetic construct
  source 1..15: mol_type = other DNA
gacacctcacttcaa

SEQ ID NO: 6088 - DNA, 15 bp, synthetic construct
  source 1..15: mol_type = other DNA
agatgaaccggtaca

SEQ ID NO: 6089 - DNA, 15 bp, synthetic construct
  source 1..15: mol_type = other DNA
ccaacgtgccatgtg

SEQ ID NO: 6090 - DNA, 15 bp, synthetic construct
  source 1..15: mol_type = other DNA
gcccacggcagattt

SEQ ID NO: 6091 - DNA, 15 bp, synthetic construct
  source 1..15: mol_type = other DNA
tggtgatccggccaa

SEQ ID NO: 6092 - DNA, 15 bp, synthetic construct
  source 1..15: mol_type = other DNA
aagccttgctttaaa

SEQ ID NO: 6093 - DNA, 15 bp, synthetic construct
  source 1..15: mol_type = other DNA
agccactgccttaaa

SEQ ID NO: 6094 - DNA, 15 bp, synthetic construct
  source 1..15: mol_type = other DNA
ggcatcacatcgacc

SEQ ID NO: 6095 - DNA, 15 bp, synthetic construct
  source 1..15: mol_type = other DNA
ttctgttgacgtgga

SEQ ID NO: 6096 - DNA, 15 bp, synthetic construct
  source 1..15: mol_type = other DNA
aatttttcccactgg

SEQ ID NO: 6097 - DNA, 15 bp, synthetic construct
  source 1..15: mol_type = other DNA
ggtcaaagggacaac

SEQ ID NO: 6098 - DNA, 15 bp, synthetic construct
  source 1..15: mol_type = other DNA
ggctcatctcacctg

SEQ ID NO: 6099 - DNA, 15 bp, synthetic construct
  source 1..15: mol_type = other DNA
acaggagtttgtaga

SEQ ID NO: 6100 - DNA, 15 bp, synthetic construct
  source 1..15: mol_type = other DNA
cttatgcagaccggg

SEQ ID NO: 6101 - DNA, 15 bp, synthetic construct
  source 1..15: mol_type = other DNA
gcactcagcgccatg

SEQ ID NO: 6102 - DNA, 15 bp, synthetic construct
  source 1..15: mol_type = other DNA
ctgcgtgtacacgag

SEQ ID NO: 6103 - DNA, 15 bp, synthetic construct
  source 1..15: mol_type = other DNA
acttcttgcgctcct

SEQ ID NO: 6104 - DNA, 15 bp, synthetic construct
  source 1..15: mol_type = other DNA
attctttcatcctca

SEQ ID NO: 6105 - DNA, 15 bp, synthetic construct
  source 1..15: mol_type = other DNA
aactggctcacgtga

SEQ ID NO: 6106 - DNA, 15 bp, synthetic construct
  source 1..15: mol_type = other DNA
aggtctaggtcgtgg

SEQ ID NO: 6107 - DNA, 15 bp, synthetic construct
  source 1..15: mol_type = other DNA
acatgagcgcgtcgg

SEQ ID NO: 6108 - DNA, 15 bp, synthetic construct
  source 1..15: mol_type = other DNA
gcatggtcacgatgc

SEQ ID NO: 6109 - DNA, 15 bp, synthetic construct
  source 1..15: mol_type = other DNA
cttcacttgaaggaa

SEQ ID NO: 6110 - DNA, 15 bp, synthetic construct
  source 1..15: mol_type = other DNA
ttctcgaagtagcgc

SEQ ID NO: 6111 - DNA, 15 bp, synthetic construct
  source 1..15: mol_type = other DNA
cacagcgccaaacac

SEQ ID NO: 6112 - DNA, 15 bp, synthetic construct
  source 1..15: mol_type = other DNA
acgcagctgttcttg

SEQ ID NO: 6113 - DNA, 15 bp, synthetic construct
  source 1..15: mol_type = other DNA
ctctaagatctcagg

SEQ ID NO: 6114 - DNA, 15 bp, synthetic construct
  source 1..15: mol_type = other DNA
cagcttaagggcgct

SEQ ID NO: 6115 - DNA, 15 bp, synthetic construct
  source 1..15: mol_type = other DNA
tctggcgttatcaca

SEQ ID NO: 6116 - DNA, 15 bp, synthetic construct
  source 1..15: mol_type = other DNA
aaagtgtaggtggac

SEQ ID NO: 6117 - DNA, 15 bp, synthetic construct
  source 1..15: mol_type = other DNA
cccagtacttgttgt

SEQ ID NO: 6118 - DNA, 15 bp, synthetic construct
  source 1..15: mol_type = other DNA
tcctttggaatcacc

SEQ ID NO: 6119 - DNA, 15 bp, synthetic construct
  source 1..15: mol_type = other DNA
cccatctccagaatt

SEQ ID NO: 6120 - DNA, 15 bp, synthetic construct
  source 1..15: mol_type = other DNA
gggaatgaggtctgc

SEQ ID NO: 6121 - DNA, 15 bp, synthetic construct
  source 1..15: mol_type = other DNA
aggtgatgctaagca

SEQ ID NO: 6122 - DNA, 15 bp, synthetic construct
  source 1..15: mol_type = other DNA
gcgccatcccaaatc

SEQ ID NO: 6123 - DNA, 15 bp, synthetic construct
  source 1..15: mol_type = other DNA
ctccgccactttgag

SEQ ID NO: 6124 - DNA, 15 bp, synthetic construct
  source 1..15: mol_type = other DNA
accaaatgggttgat

SEQ ID NO: 6125 - DNA, 15 bp, synthetic construct
  source 1..15: mol_type = other DNA
agcgatatcgtcacg

SEQ ID NO: 6126 - DNA, 15 bp, synthetic construct
  source 1..15: mol_type = other DNA
tgcaagttgcggtct

SEQ ID NO: 6127 - DNA, 15 bp, synthetic construct
  source 1..15: mol_type = other DNA
acaaggtagaactga

SEQ ID NO: 6128 - DNA, 15 bp, synthetic construct
  source 1..15: mol_type = other DNA
ggttctggtacattt

SEQ ID NO: 6129 - DNA, 15 bp, synthetic construct
  source 1..15: mol_type = other DNA
tgctgatccagtcat

SEQ ID NO: 6130 - DNA, 15 bp, synthetic construct
  source 1..15: mol_type = other DNA
tcaagttctgtccct

SEQ ID NO: 6131 - DNA, 15 bp, synthetic construct
  source 1..15: mol_type = other DNA
ggcacacaggaaaag

SEQ ID NO: 6132 - DNA, 15 bp, synthetic construct
  source 1..15: mol_type = other DNA
tccttaagtttgaga

SEQ ID NO: 6133 - DNA, 15 bp, synthetic construct
  source 1..15: mol_type = other DNA
gtcagtggacaaggg

SEQ ID NO: 6134 - DNA, 15 bp, synthetic construct
  source 1..15: mol_type = other DNA
tgagtaaggttacca

SEQ ID NO: 6135 - DNA, 15 bp, synthetic construct
  source 1..15: mol_type = other DNA
cagatcctgaactgc

SEQ ID NO: 6136 - DNA, 15 bp, synthetic construct
  source 1..15: mol_type = other DNA
gccacctgagcatac

SEQ ID NO: 6137 - DNA, 15 bp, synthetic construct
  source 1..15: mol_type = other DNA
tggaagctgattaac

SEQ ID NO: 6138 - DNA, 15 bp, synthetic construct
  source 1..15: mol_type = other DNA
ggaattccttgtaga

SEQ ID NO: 6139 - DNA, 15 bp, synthetic construct
  source 1..15: mol_type = other DNA
caaggcaaaagtccc

SEQ ID NO: 6140 - DNA, 15 bp, synthetic construct
  source 1..15: mol_type = other DNA
tggcagcgggatgct

SEQ ID NO: 6141 - DNA, 15 bp, synthetic construct
  source 1..15: mol_type = other DNA
ggacccagtacttgt

SEQ ID NO: 6142 - DNA, 15 bp, synthetic construct
  source 1..15: mol_type = other DNA
ggctgtcgtttagtt

SEQ ID NO: 6143 - DNA, 15 bp, synthetic construct
  source 1..15: mol_type = other DNA
agcactcttttgaca

SEQ ID NO: 6144 - DNA, 15 bp, synthetic construct
  source 1..15: mol_type = other DNA
ctgaaaatttgcaga

SEQ ID NO: 6145 - DNA, 15 bp, synthetic construct
  source 1..15: mol_type = other DNA
ggttaatttcccttc

SEQ ID NO: 6146 - DNA, 15 bp, synthetic construct
  source 1..15: mol_type = other DNA
ccatcttttgctata

SEQ ID NO: 6147 - DNA, 15 bp, synthetic construct
  source 1..15: mol_type = other DNA
tatttgacatcctgt

SEQ ID NO: 6148 - DNA, 15 bp, synthetic construct
  source 1..15: mol_type = other DNA
ttcaaagggatctcc

SEQ ID NO: 6149 - DNA, 15 bp, synthetic construct
  source 1..15: mol_type = other DNA
tcttgagttcggtcc

SEQ ID NO: 6150 - DNA, 15 bp, synthetic construct
  source 1..15: mol_type = other DNA
agttccaagcatggc

SEQ ID NO: 6151 - DNA, 15 bp, synthetic construct
  source 1..15: mol_type = other DNA
acacacatcacattc

SEQ ID NO: 6152 - DNA, 15 bp, synthetic construct
  source 1..15: mol_type = other DNA
ccaagtcacatgagg

SEQ ID NO: 6153 - DNA, 15 bp, synthetic construct
  source 1..15: mol_type = other DNA
tatcctatggaccct

SEQ ID NO: 6154 - DNA, 15 bp, synthetic construct
  source 1..15: mol_type = other DNA
tcagtttacctaccc

SEQ ID NO: 6155 - DNA, 15 bp, synthetic construct
  source 1..15: mol_type = other DNA
tgatcattcaatggt

SEQ ID NO: 6156 - DNA, 15 bp, synthetic construct
  source 1..15: mol_type = other DNA
gtctgcttgccattt

SEQ ID NO: 6157 - DNA, 15 bp, synthetic construct
  source 1..15: mol_type = other DNA
attccagtttctgat

SEQ ID NO: 6158 - DNA, 15 bp, synthetic construct
  source 1..15: mol_type = other DNA
tctgttggtgcttct

SEQ ID NO: 6159 - DNA, 15 bp, synthetic construct
  source 1..15: mol_type = other DNA
tgtcaatttgatcag

SEQ ID NO: 6160 - DNA, 15 bp, synthetic construct
  source 1..15: mol_type = other DNA
aactgctcaagtaga

SEQ ID NO: 6161 - DNA, 15 bp, synthetic construct
  source 1..15: mol_type = other DNA
gcctggctaaaacag

SEQ ID NO: 6162 - DNA, 15 bp, synthetic construct
  source 1..15: mol_type = other DNA
cttgcccagtgatac

SEQ ID NO: 6163 - DNA, 15 bp, synthetic construct
  source 1..15: mol_type = other DNA
ccaggtatgtggaac

SEQ ID NO: 6164 - DNA, 15 bp, synthetic construct
  source 1..15: mol_type = other DNA
tgtccagatatggga

SEQ ID NO: 6165 - DNA, 15 bp, synthetic construct
  source 1..15: mol_type = other DNA
acagcaagatgcaga

SEQ ID NO: 6166 - DNA, 15 bp, synthetic construct
  source 1..15: mol_type = other DNA
attagtctatgtgac

SEQ ID NO: 6167 - DNA, 15 bp, synthetic construct
  source 1..15: mol_type = other DNA
tgtcactacagatga

SEQ ID NO: 6168 - DNA, 15 bp, synthetic construct
  source 1..15: mol_type = other DNA
cttcagcaagactgg

SEQ ID NO: 6169 - DNA, 15 bp, synthetic construct
  source 1..15: mol_type = other DNA
gacacacaactgata

SEQ ID NO: 6170 - DNA, 15 bp, synthetic construct
  source 1..15: mol_type = other DNA
cccacgcatatacac

SEQ ID NO: 6171 - DNA, 15 bp, synthetic construct
  source 1..15: mol_type = other DNA
tgtgatccttctggt

SEQ ID NO: 6172 - DNA, 15 bp, synthetic construct
  source 1..15: mol_type = other DNA
tcatacactcccaca

SEQ ID NO: 6173 - DNA, 15 bp, synthetic construct
  source 1..15: mol_type = other DNA
agagccctggtaaat

SEQ ID NO: 6174 - DNA, 15 bp, synthetic construct
  source 1..15: mol_type = other DNA
acacacaggaattca

SEQ ID NO: 6175 - DNA, 15 bp, synthetic construct
  source 1..15: mol_type = other DNA
gactccctttctact

SEQ ID NO: 6176 - DNA, 15 bp, synthetic construct
  source 1..15: mol_type = other DNA
gcgcctgctccttat

SEQ ID NO: 6177 - DNA, 15 bp, synthetic construct
  source 1..15: mol_type = other DNA
agaaacgagcttctt

SEQ ID NO: 6178 - DNA, 15 bp, synthetic construct
  source 1..15: mol_type = other DNA
gcctttcttctagaa

SEQ ID NO: 6179 - DNA, 15 bp, synthetic construct
  source 1..15: mol_type = other DNA
acttcatctgtaaag

SEQ ID NO: 6180 - DNA, 15 bp, synthetic construct
  source 1..15: mol_type = other DNA
gcactggattgttat

SEQ ID NO: 6181 - DNA, 15 bp, synthetic construct
  source 1..15: mol_type = other DNA
gaagcaatagcgccc

SEQ ID NO: 6182 - DNA, 15 bp, synthetic construct
  source 1..15: mol_type = other DNA
ggagaaatgccagat

SEQ ID NO: 6183 - DNA, 15 bp, synthetic construct
  source 1..15: mol_type = other DNA
tgcacacaatgatat

SEQ ID NO: 6184 - DNA, 15 bp, synthetic construct
  source 1..15: mol_type = other DNA
tctcatccacgcacc

SEQ ID NO: 6185 - DNA, 15 bp, synthetic construct
  source 1..15: mol_type = other DNA
ggagacgatggacag

SEQ ID NO: 6186 - DNA, 15 bp, synthetic construct
  source 1..15: mol_type = other DNA
accttgacttggctt

SEQ ID NO: 6187 - DNA, 15 bp, synthetic construct
  source 1..15: mol_type = other DNA
tatgggataaagggc

SEQ ID NO: 6188 - DNA, 15 bp, synthetic construct
  source 1..15: mol_type = other DNA
cagacacagatgttt

SEQ ID NO: 6189 - DNA, 15 bp, synthetic construct
  source 1..15: mol_type = other DNA
atgctccgagtagca

SEQ ID NO: 6190 - DNA, 15 bp, synthetic construct
  source 1..15: mol_type = other DNA
atgtaggatgcccgg

SEQ ID NO: 6191 - DNA, 15 bp, synthetic construct
  source 1..15: mol_type = other DNA
gtcctagaatcaggc

SEQ ID NO: 6192 - DNA, 15 bp, synthetic construct
  source 1..15: mol_type = other DNA
tcttggcaatgctga

SEQ ID NO: 6193 - DNA, 15 bp, synthetic construct
  source 1..15: mol_type = other DNA
catgaggttcacgca

SEQ ID NO: 6194 - DNA, 15 bp, synthetic construct
  source 1..15: mol_type = other DNA
gagaagacaatgtga

SEQ ID NO: 6195 - DNA, 15 bp, synthetic construct
  source 1..15: mol_type = other DNA
tcctggaaatggact

SEQ ID NO: 6196 - DNA, 15 bp, synthetic construct
  source 1..15: mol_type = other DNA
cttgccagttgatgt

SEQ ID NO: 6197 - DNA, 15 bp, synthetic construct
  source 1..15: mol_type = other DNA
gcagcattcaccaag

SEQ ID NO: 6198 - DNA, 15 bp, synthetic construct
  source 1..15: mol_type = other DNA
tggtgatcacgtggt

SEQ ID NO: 6199 - DNA, 15 bp, synthetic construct
  source 1..15: mol_type = other DNA
cacatctgccattag

SEQ ID NO: 6200 - DNA, 15 bp, synthetic construct
  source 1..15: mol_type = other DNA
ggaaggtgttgtagg

SEQ ID NO: 6201 - DNA, 15 bp, synthetic construct
  source 1..15: mol_type = other DNA
cagtcagagcctttg

SEQ ID NO: 6202 - DNA, 15 bp, synthetic construct
  source 1..15: mol_type = other DNA
ttgatggttcttgtg

SEQ ID NO: 6203 - DNA, 15 bp, synthetic construct
  source 1..15: mol_type = other DNA
tcttcagctagagca

SEQ ID NO: 6204 - DNA, 15 bp, synthetic construct
  source 1..15: mol_type = other DNA
caggaacccggaaaa

SEQ ID NO: 6205 - DNA, 15 bp, synthetic construct
  source 1..15: mol_type = other DNA
ttcatcatcatactg

SEQ ID NO: 6206 - DNA, 15 bp, synthetic construct
  source 1..15: mol_type = other DNA
gtggccttgtagtct

SEQ ID NO: 6207 - DNA, 15 bp, synthetic construct
  source 1..15: mol_type = other DNA
tgagatcactgagac

SEQ ID NO: 6208 - DNA, 15 bp, synthetic construct
  source 1..15: mol_type = other DNA
ggatcttcatcatca

SEQ ID NO: 6209 - DNA, 15 bp, synthetic construct
  source 1..15: mol_type = other DNA
cagtgtcctgctaaa

SEQ ID NO: 6210 - DNA, 15 bp, synthetic construct
  source 1..15: mol_type = other DNA
gaacttgccactgcg

SEQ ID NO: 6211 - DNA, 15 bp, synthetic construct
  source 1..15: mol_type = other DNA
gcagacatccctaat

SEQ ID NO: 6212 - DNA, 15 bp, synthetic construct
  source 1..15: mol_type = other DNA
cttgactttaaagcc

SEQ ID NO: 6213 - DNA, 15 bp, synthetic construct
  source 1..15: mol_type = other DNA
tactgccctcggtcc

SEQ ID NO: 6214 - DNA, 15 bp, synthetic construct
  source 1..15: mol_type = other DNA
gctggcgtggtaggt

SEQ ID NO: 6215 - DNA, 15 bp, synthetic construct
  source 1..15: mol_type = other DNA
gctacctgcactgtt

SEQ ID NO: 6216 - DNA, 15 bp, synthetic construct
  source 1..15: mol_type = other DNA
ggcagtccgtcgtac

SEQ ID NO: 6217 - DNA, 15 bp, synthetic construct
  source 1..15: mol_type = other DNA
ggtggaggaaacggc

SEQ ID NO: 6218 - DNA, 15 bp, synthetic construct
  source 1..15: mol_type = other DNA
ctttgggtcctcgga

SEQ ID NO: 6219 - DNA, 15 bp, synthetic construct
  source 1..15: mol_type = other DNA
agcagtgactcctaa

SEQ ID NO: 6220 - DNA, 15 bp, synthetic construct
  source 1..15: mol_type = other DNA
gagaatggtctaggc

SEQ ID NO: 6221 - DNA, 15 bp, synthetic construct
  source 1..15: mol_type = other DNA
tgaacttgccagtgc

SEQ ID NO: 6222 - DNA, 15 bp, synthetic construct
  source 1..15: mol_type = other DNA
aaaagaatggcagta

SEQ ID NO: 6223 - DNA, 15 bp, synthetic construct
  source 1..15: mol_type = other DNA
gtatgcgacgcgtgg

SEQ ID NO: 6224 - DNA, 15 bp, synthetic construct
  source 1..15: mol_type = other DNA
ggaacacagcgctgg

SEQ ID NO: 6225 - DNA, 15 bp, synthetic construct
  source 1..15: mol_type = other DNA
gtgaccgtgaacact

SEQ ID NO: 6226 - DNA, 15 bp, synthetic construct
  source 1..15: mol_type = other DNA
tggtgaggaccgcgt

SEQ ID NO: 6227 - DNA, 15 bp, synthetic construct
  source 1..15: mol_type = other DNA
atctccttctcatag

SEQ ID NO: 6228 - DNA, 15 bp, synthetic construct
  source 1..15: mol_type = other DNA
tgacctgattggttt

SEQ ID NO: 6229 - DNA, 15 bp, synthetic construct
  source 1..15: mol_type = other DNA
ccaccatgtcgtagt

SEQ ID NO: 6230 - DNA, 15 bp, synthetic construct
  source 1..15: mol_type = other DNA
gtgtgtgaatatgcg

SEQ ID NO: 6231 - DNA, 15 bp, synthetic construct
  source 1..15: mol_type = other DNA
ttttccatcatctct

SEQ ID NO: 6232 - DNA, 15 bp, synthetic construct
  source 1..15: mol_type = other DNA
gacccagaacgatca

SEQ ID NO: 6233 - DNA, 15 bp, synthetic construct
  source 1..15: mol_type = other DNA
gcagtgcttccattt

SEQ ID NO: 6234 - DNA, 15 bp, synthetic construct
  source 1..15: mol_type = other DNA
cgtcgaaatggagcc

SEQ ID NO: 6235 - DNA, 15 bp, synthetic construct
  source 1..15: mol_type = other DNA
gcaagatccgttcgg

SEQ ID NO: 6236 - DNA, 15 bp, synthetic construct
  source 1..15: mol_type = other DNA
gatacccttggtgga

SEQ ID NO: 6237 - DNA, 15 bp, synthetic construct
  source 1..15: mol_type = other DNA
ttgttcttgagggaa

SEQ ID NO: 6238 - DNA, 15 bp, synthetic construct
  source 1..15: mol_type = other DNA
cgcacagatccttca

SEQ ID NO: 6239 - DNA, 15 bp, synthetic construct
  source 1..15: mol_type = other DNA
gaaccgatagttttg

SEQ ID NO: 6240 - DNA, 15 bp, synthetic construct
  source 1..15: mol_type = other DNA
gaagtatgcaaacta

SEQ ID NO: 6241 - DNA, 15 bp, synthetic construct
  source 1..15: mol_type = other DNA
agccaatctcccact

SEQ ID NO: 6242 - DNA, 15 bp, synthetic construct
  source 1..15: mol_type = other DNA
agaagaaaattctcc

SEQ ID NO: 6243 - DNA, 15 bp, synthetic construct
  source 1..15: mol_type = other DNA
ccttagtgaggacaa

SEQ ID NO: 6244 - DNA, 15 bp, synthetic construct
  source 1..15: mol_type = other DNA
agaaacaagctgaaa

SEQ ID NO: 6245 - DNA, 15 bp, synthetic construct
  source 1..15: mol_type = other DNA
atttcacatggacac

SEQ ID NO: 6246 - DNA, 15 bp, synthetic construct
  source 1..15: mol_type = other DNA
gtttctatgaagcca

SEQ ID NO: 6247 - DNA, 15 bp, synthetic construct
  source 1..15: mol_type = other DNA
aagtggttgcggcca

SEQ ID NO: 6248 - DNA, 15 bp, synthetic construct
  source 1..15: mol_type = other DNA
actgactggcctaag

SEQ ID NO: 6249 - DNA, 15 bp, synthetic construct
  source 1..15: mol_type = other DNA
ggagtgagcaaaagc

SEQ ID NO: 6250 - DNA, 15 bp, synthetic construct
  source 1..15: mol_type = other DNA
gaaaatacagcctac

SEQ ID NO: 6251 - DNA, 15 bp, synthetic construct
  source 1..15: mol_type = other DNA
tcagacagatttatg

SEQ ID NO: 6252 - DNA, 15 bp, synthetic construct
  source 1..15: mol_type = other DNA
cttcggaatgaccct

SEQ ID NO: 6253 - DNA, 15 bp, synthetic construct
  source 1..15: mol_type = other DNA
gagccctccaaactg

SEQ ID NO: 6254 - DNA, 15 bp, synthetic construct
  source 1..15: mol_type = other DNA
tcccatggctaggca

SEQ ID NO: 6255 - DNA, 15 bp, synthetic construct
  source 1..15: mol_type = other DNA
cttggtctcattttc

SEQ ID NO: 6256 - DNA, 15 bp, synthetic construct
  source 1..15: mol_type = other DNA
cgcgtagctaccctc

SEQ ID NO: 6257 - DNA, 15 bp, synthetic construct
  source 1..15: mol_type = other DNA
atggtaaagcctggt

SEQ ID NO: 6258 - DNA, 15 bp, synthetic construct
  source 1..15: mol_type = other DNA
cgcccgaaagtgagg

SEQ ID NO: 6259 - DNA, 15 bp, synthetic construct
  source 1..15: mol_type = other DNA
cctactttcttccac

SEQ ID NO: 6260 - DNA, 15 bp, synthetic construct
  source 1..15: mol_type = other DNA
tcagacaggcaacaa

SEQ ID NO: 6261 - DNA, 15 bp, synthetic construct
  source 1..15: mol_type = other DNA
ccgtgactgcgttca

SEQ ID NO: 6262 - DNA, 15 bp, synthetic construct
  source 1..15: mol_type = other DNA
aatagtcaagtcgat

SEQ ID NO: 6263 - DNA, 15 bp, synthetic construct
  source 1..15: mol_type = other DNA
attaaaagtggagtc

SEQ ID NO: 6264 - DNA, 15 bp, synthetic construct
  source 1..15: mol_type = other DNA
gactatatggtcaat

SEQ ID NO: 6265 - DNA, 15 bp, synthetic construct
  source 1..15: mol_type = other DNA
ctgcctatccatgcg

SEQ ID NO: 6266 - DNA, 15 bp, synthetic construct
  source 1..15: mol_type = other DNA
accggaaacgggctg

SEQ ID NO: 6267 - DNA, 15 bp, synthetic construct
  source 1..15: mol_type = other DNA
cctcctcatcgtggg

SEQ ID NO: 6268 - DNA, 15 bp, synthetic construct
  source 1..15: mol_type = other DNA
cccagcttgttcatc

SEQ ID NO: 6269 - DNA, 15 bp, synthetic construct
  source 1..15: mol_type = other DNA
ctggaacttttcggc

SEQ ID NO: 6270 - DNA, 15 bp, synthetic construct
  source 1..15: mol_type = other DNA
gggtgagtcgtgctg

SEQ ID NO: 6271 - DNA, 15 bp, synthetic construct
  source 1..15: mol_type = other DNA
atactaaaggcaggg

SEQ ID NO: 6272 - DNA, 15 bp, synthetic construct
  source 1..15: mol_type = other DNA
ctgcacagcgtctag

SEQ ID NO: 6273 - DNA, 15 bp, synthetic construct
  source 1..15: mol_type = other DNA
gatgagcactttgaa

SEQ ID NO: 6274 - DNA, 15 bp, synthetic construct
  source 1..15: mol_type = other DNA
gagaaaatgctttct

SEQ ID NO: 6275 - DNA, 15 bp, synthetic construct
  source 1..15: mol_type = other DNA
cagggatttgttttc

SEQ ID NO: 6276 - DNA, 15 bp, synthetic construct
  source 1..15: mol_type = other DNA
ggactcgccatccgt

SEQ ID NO: 6277 - DNA, 15 bp, synthetic construct
  source 1..15: mol_type = other DNA
cccacccgtcttaga

SEQ ID NO: 6278 - DNA, 15 bp, synthetic construct
  source 1..15: mol_type = other DNA
accctgaaacccttt

SEQ ID NO: 6279 - DNA, 15 bp, synthetic construct
  source 1..15: mol_type = other DNA
ttgagttcgccgcgt

SEQ ID NO: 6280 - DNA, 15 bp, synthetic construct
  source 1..15: mol_type = other DNA
gtgtgtggttgcact

SEQ ID NO: 6281 - DNA, 15 bp, synthetic construct
  source 1..15: mol_type = other DNA
gcaggttcttaacga

SEQ ID NO: 6282 - DNA, 15 bp, synthetic construct
  source 1..15: mol_type = other DNA
ctttccctgcacgcg

SEQ ID NO: 6283 - DNA, 15 bp, synthetic construct
  source 1..15: mol_type = other DNA
aacattttcagacca

SEQ ID NO: 6284 - DNA, 15 bp, synthetic construct
  source 1..15: mol_type = other DNA
ggccaaaatccatcc

SEQ ID NO: 6285 - DNA, 15 bp, synthetic construct
  source 1..15: mol_type = other DNA
aaagtttgaggaagt

SEQ ID NO: 6286 - DNA, 15 bp, synthetic construct
  source 1..15: mol_type = other DNA
ccatttcacagaccg

SEQ ID NO: 6287 - DNA, 15 bp, synthetic construct
  source 1..15: mol_type = other DNA
aggccttgaaccttg

SEQ ID NO: 6288 - DNA, 15 bp, synthetic construct
  source 1..15: mol_type = other DNA
tcatgtatttaccca

SEQ ID NO: 6289 - DNA, 15 bp, synthetic construct
  source 1..15: mol_type = other DNA
atcggaatccgtatt

SEQ ID NO: 6290 - DNA, 15 bp, synthetic construct
  source 1..15: mol_type = other DNA
cttctcagccgcatt

SEQ ID NO: 6291 - DNA, 15 bp, synthetic construct
  source 1..15: mol_type = other DNA
ccgtgttgagcagaa

SEQ ID NO: 6292 - DNA, 15 bp, synthetic construct
  source 1..15: mol_type = other DNA
gagactttcatgctg

SEQ ID NO: 6293 - DNA, 15 bp, synthetic construct
  source 1..15: mol_type = other DNA
gggtagaactgtggt

SEQ ID NO: 6294 - DNA, 15 bp, synthetic construct
  source 1..15: mol_type = other DNA
tggtgcctcagtttt

SEQ ID NO: 6295 - DNA, 15 bp, synthetic construct
  source 1..15: mol_type = other DNA
ttgagaattggatgt

SEQ ID NO: 6296 - DNA, 15 bp, synthetic construct
  source 1..15: mol_type = other DNA
catggaatcctgaac

SEQ ID NO: 6297 - DNA, 15 bp, synthetic construct
  source 1..15: mol_type = other DNA
cacatcacagcttct

SEQ ID NO: 6298 - DNA, 15 bp, synthetic construct
  source 1..15: mol_type = other DNA
agtcttcggagtttg

SEQ ID NO: 6299 - DNA, 15 bp, synthetic construct
  source 1..15: mol_type = other DNA
ccatcctgacttcaa

SEQ ID NO: 6300 - DNA, 15 bp, synthetic construct
  source 1..15: mol_type = other DNA
ggaagaacttcaggc

SEQ ID NO: 6301 - DNA, 15 bp, synthetic construct
  source 1..15: mol_type = other DNA
tagctgcagattctt

SEQ ID NO: 6302 - DNA, 15 bp, synthetic construct
  source 1..15: mol_type = other DNA
tgcactctctgactc

SEQ ID NO: 6303 - DNA, 15 bp, synthetic construct
  source 1..15: mol_type = other DNA
ctgcactgagatctt

SEQ ID NO: 6304 - DNA, 15 bp, synthetic construct
  source 1..15: mol_type = other DNA
gctggtgattcttct

SEQ ID NO: 6305 - DNA, 15 bp, synthetic construct
  source 1..15: mol_type = other DNA
ggagagtgatgttgg

SEQ ID NO: 6306 - DNA, 15 bp, synthetic construct
  source 1..15: mol_type = other DNA
tgattcttgcaaaga

SEQ ID NO: 6307 - DNA, 15 bp, synthetic construct
  source 1..15: mol_type = other DNA
cctttgcagttttgg

SEQ ID NO: 6308 - DNA, 15 bp, synthetic construct
  source 1..15: mol_type = other DNA
gcacagatctccttg

SEQ ID NO: 6309 - DNA, 15 bp, synthetic construct
  source 1..15: mol_type = other DNA
aagaacagatctgct

SEQ ID NO: 6310 - DNA, 15 bp, synthetic construct
  source 1..15: mol_type = other DNA
ctccatgatgtgcaa

SEQ ID NO: 6311 - DNA, 15 bp, synthetic construct
  source 1..15: mol_type = other DNA
ctgatgaatgtagcc

SEQ ID NO: 6312 - DNA, 15 bp, synthetic construct
  source 1..15: mol_type = other DNA
tcgatttatcacgac

SEQ ID NO: 6313 - DNA, 15 bp, synthetic construct
  source 1..15: mol_type = other DNA
gcaaggttctttctg

SEQ ID NO: 6314 - DNA, 15 bp, synthetic construct
  source 1..15: mol_type = other DNA
cacccaagtctgttt

SEQ ID NO: 6315 - DNA, 15 bp, synthetic construct
  source 1..15: mol_type = other DNA
ttggacaagtccagt

SEQ ID NO: 6316 - DNA, 15 bp, synthetic construct
  source 1..15: mol_type = other DNA
caggcactgtatgaa

SEQ ID NO: 6317 - DNA, 15 bp, synthetic construct
  source 1..15: mol_type = other DNA
atagcattgatgtca

SEQ ID NO: 6318 - DNA, 15 bp, synthetic construct
  source 1..15: mol_type = other DNA
gacatcaaagcagcc

SEQ ID NO: 6319 - DNA, 15 bp, synthetic construct
  source 1..15: mol_type = other DNA
ctcggctcttaaaga

SEQ ID NO: 6320 - DNA, 15 bp, synthetic construct
  source 1..15: mol_type = other DNA
taggatgaagaatac

SEQ ID NO: 6321 - DNA, 15 bp, synthetic construct
  source 1..15: mol_type = other DNA
ttctttgggagtgct

SEQ ID NO: 6322 - DNA, 15 bp, synthetic construct
  source 1..15: mol_type = other DNA
gcatgattctgagca

SEQ ID NO: 6323 - DNA, 15 bp, synthetic construct
  source 1..15: mol_type = other DNA
cagccctgaacaaaa

SEQ ID NO: 6324 - DNA, 15 bp, synthetic construct
  source 1..15: mol_type = other DNA
agctatgaaattctg

SEQ ID NO: 6325 - DNA, 15 bp, synthetic construct
  source 1..15: mol_type = other DNA
tttggtgccatgact

SEQ ID NO: 6326 - DNA, 15 bp, synthetic construct
  source 1..15: mol_type = other DNA
ggcaacaaccagtcc

SEQ ID NO: 6327 - DNA, 15 bp, synthetic construct
  source 1..15: mol_type = other DNA
agccactcggttgtc

SEQ ID NO: 6328 - DNA, 15 bp, synthetic construct
  source 1..15: mol_type = other DNA
gaactctcagagcaa

SEQ ID NO: 6329 - DNA, 15 bp, synthetic construct
  source 1..15: mol_type = other DNA
atggtattggtggaa

SEQ ID NO: 6330 - DNA, 15 bp, synthetic construct
  source 1..15: mol_type = other DNA
gtaatctaccacaaa

SEQ ID NO: 6331 - DNA, 15 bp, synthetic construct
  source 1..15: mol_type = other DNA
gggatcagcacagac

SEQ ID NO: 6332 - DNA, 15 bp, synthetic construct
  source 1..15: mol_type = other DNA
cagctcagttcagtt

SEQ ID NO: 6333 - DNA, 15 bp, synthetic construct
  source 1..15: mol_type = other DNA
gagtatggaggagat

SEQ ID NO: 6334 - DNA, 15 bp, synthetic construct
  source 1..15: mol_type = other DNA
gcaacagcagagaaa

SEQ ID NO: 6335 - DNA, 15 bp, synthetic construct
  source 1..15: mol_type = other DNA
cccttgttcagccgg

SEQ ID NO: 6336 - DNA, 15 bp, synthetic construct
  source 1..15: mol_type = other DNA
cttccttttgacaaa

SEQ ID NO: 6337 - DNA, 15 bp, synthetic construct
  source 1..15: mol_type = other DNA
ccactggtgtagaaa

SEQ ID NO: 6338 - DNA, 15 bp, synthetic construct
  source 1..15: mol_type = other DNA
acacacttggcggtt

SEQ ID NO: 6339 - DNA, 15 bp, synthetic construct
  source 1..15: mol_type = other DNA
gggcagtagcaatga

SEQ ID NO: 6340 - DNA, 15 bp, synthetic construct
  source 1..15: mol_type = other DNA
aagttcaggttcaag

SEQ ID NO: 6341 - DNA, 15 bp, synthetic construct
  source 1..15: mol_type = other DNA
ccaaagagttgatgt

SEQ ID NO: 6342 - DNA, 15 bp, synthetic construct
  source 1..15: mol_type = other DNA
tttttcatgtttgcc

SEQ ID NO: 6343 - DNA, 15 bp, synthetic construct
  source 1..15: mol_type = other DNA
tgagacggcggaagc

SEQ ID NO: 6344 - DNA, 15 bp, synthetic construct
  source 1..15: mol_type = other DNA
aggtttttgtaactg

SEQ ID NO: 6345 - DNA, 15 bp, synthetic construct
  source 1..15: mol_type = other DNA
caagagcaagcagaa

SEQ ID NO: 6346 - DNA, 15 bp, synthetic construct
  source 1..15: mol_type = other DNA
ctccttgcctctaga

SEQ ID NO: 6347 - DNA, 15 bp, synthetic construct
  source 1..15: mol_type = other DNA
gaagccagacgtgtg

SEQ ID NO: 6348 - DNA, 15 bp, synthetic construct
  source 1..15: mol_type = other DNA
tggtatgtcaggctt

SEQ ID NO: 6349 - DNA, 15 bp, synthetic construct
  source 1..15: mol_type = other DNA
ggcaatcctacagcc

SEQ ID NO: 6350 - DNA, 15 bp, synthetic construct
  source 1..15: mol_type = other DNA
atgacagcgatggag

SEQ ID NO: 6351 - DNA, 15 bp, synthetic construct
  source 1..15: mol_type = other DNA
tgataaaccgagaac

SEQ ID NO: 6352 - DNA, 15 bp, synthetic construct
  source 1..15: mol_type = other DNA
acacttccaactcct

SEQ ID NO: 6353 - DNA, 15 bp, synthetic construct
  source 1..15: mol_type = other DNA
tttcggaaatagttc

SEQ ID NO: 6354 - DNA, 15 bp, synthetic construct
  source 1..15: mol_type = other DNA
tctcataatcactac

SEQ ID NO: 6355 - DNA, 15 bp, synthetic construct
  source 1..15: mol_type = other DNA
acctggtgaaccctt

SEQ ID NO: 6356 - DNA, 15 bp, synthetic construct
  source 1..15: mol_type = other DNA
ggtgctttcacagtt

SEQ ID NO: 6357 - DNA, 15 bp, synthetic construct
  source 1..15: mol_type = other DNA
ctcccaaacatacca

SEQ ID NO: 6358 - DNA, 15 bp, synthetic construct
  source 1..15: mol_type = other DNA
aagaagattccgcca

SEQ ID NO: 6359 - DNA, 15 bp, synthetic construct
  source 1..15: mol_type = other DNA
caagtcttgtatttc

SEQ ID NO: 6360 - DNA, 15 bp, synthetic construct
  source 1..15: mol_type = other DNA
ttcttctcgtttcga

SEQ ID NO: 6361 - DNA, 15 bp, synthetic construct
  source 1..15: mol_type = other DNA
atgaggcatttttca

SEQ ID NO: 6362 - DNA, 15 bp, synthetic construct
  source 1..15: mol_type = other DNA
gttgtggatgtactg

SEQ ID NO: 6363 - DNA, 15 bp, synthetic construct
  source 1..15: mol_type = other DNA
atgttggatatgcat

SEQ ID NO: 6364 - DNA, 15 bp, synthetic construct
  source 1..15: mol_type = other DNA
tttctgaaaccttct

SEQ ID NO: 6365 - DNA, 15 bp, synthetic construct
  source 1..15: mol_type = other DNA
acaaaaccaaagatg

SEQ ID NO: 6366 - DNA, 15 bp, synthetic construct
  source 1..15: mol_type = other DNA
cattacttagatgct

SEQ ID NO: 6367 - DNA, 15 bp, synthetic construct
  source 1..15: mol_type = other DNA
tcaaatgtaaggtgc

SEQ ID NO: 6368 - DNA, 15 bp, synthetic construct
  source 1..15: mol_type = other DNA
taacttggctcgact

SEQ ID NO: 6369 - DNA, 15 bp, synthetic construct
  source 1..15: mol_type = other DNA
ctggttctagaagcc

SEQ ID NO: 6370 - DNA, 15 bp, synthetic construct
  source 1..15: mol_type = other DNA
ccttttccacgacca

SEQ ID NO: 6371 - DNA, 15 bp, synthetic construct
  source 1..15: mol_type = other DNA
gagagtttcttgtag

SEQ ID NO: 6372 - DNA, 15 bp, synthetic construct
  source 1..15: mol_type = other DNA
ccactagatggagag

SEQ ID NO: 6373 - DNA, 15 bp, synthetic construct
  source 1..15: mol_type = other DNA
acaagtctctcgcct

SEQ ID NO: 6374 - DNA, 15 bp, synthetic construct
  source 1..15: mol_type = other DNA
gggtgtaaactgagc

SEQ ID NO: 6375 - DNA, 15 bp, synthetic construct
  source 1..15: mol_type = other DNA
aaagtcctagaatgt

SEQ ID NO: 6376 - DNA, 15 bp, synthetic construct
  source 1..15: mol_type = other DNA
aatgttgtagggagc

SEQ ID NO: 6377 - DNA, 15 bp, synthetic construct
  source 1..15: mol_type = other DNA
aaggaaagacatttc

SEQ ID NO: 6378 - DNA, 15 bp, synthetic construct
  source 1..15: mol_type = other DNA
tcttctcatttcgac

SEQ ID NO: 6379 - DNA, 15 bp, synthetic construct
  source 1..15: mol_type = other DNA
caagcaatgaagttt

SEQ ID NO: 6380 - DNA, 15 bp, synthetic construct
  source 1..15: mol_type = other DNA
ggcagcatcttagtt

SEQ ID NO: 6381 - DNA, 15 bp, synthetic construct
  source 1..15: mol_type = other DNA
aggctgtgtatgaaa

SEQ ID NO: 6382 - DNA, 15 bp, synthetic construct
  source 1..15: mol_type = other DNA
gcttttaaagcaaac

SEQ ID NO: 6383 - DNA, 15 bp, synthetic construct
  source 1..15: mol_type = other DNA
ttcagccttttgcag

SEQ ID NO: 6384 - DNA, 15 bp, synthetic construct
  source 1..15: mol_type = other DNA
caaaccagacccatc

SEQ ID NO: 6385 - DNA, 15 bp, synthetic construct
  source 1..15: mol_type = other DNA
cagtgctatccctga

SEQ ID NO: 6386 - DNA, 15 bp, synthetic construct
  source 1..15: mol_type = other DNA
cagttctgctgactc

SEQ ID NO: 6387 - DNA, 15 bp, synthetic construct
  source 1..15: mol_type = other DNA
tgcatagcttggtcc

SEQ ID NO: 6388 - DNA, 15 bp, synthetic construct
  source 1..15: mol_type = other DNA
gatgatgaagaagat

SEQ ID NO: 6389 - DNA, 15 bp, synthetic construct
  source 1..15: mol_type = other DNA
tctccttctacagcc

SEQ ID NO: 6390 - DNA, 15 bp, synthetic construct
  source 1..15: mol_type = other DNA
caagaatcagcaatt

SEQ ID NO: 6391 - DNA, 15 bp, synthetic construct
  source 1..15: mol_type = other DNA
gctcatgacttagac

SEQ ID NO: 6392 - DNA, 15 bp, synthetic construct
  source 1..15: mol_type = other DNA
accacttactattcc

SEQ ID NO: 6393 - DNA, 15 bp, synthetic construct
  source 1..15: mol_type = other DNA
ggtttctccaatctg

SEQ ID NO: 6394 - DNA, 15 bp, synthetic construct
  source 1..15: mol_type = other DNA
cccattcagtctgaa

SEQ ID NO: 6395 - DNA, 15 bp, synthetic construct
  source 1..15: mol_type = other DNA
tgtccactcaaagag

SEQ ID NO: 6396 - DNA, 15 bp, synthetic construct
  source 1..15: mol_type = other DNA
tgcgattggaccctg

SEQ ID NO: 6397 - DNA, 15 bp, synthetic construct
  source 1..15: mol_type = other DNA
tgttgtctgtctggt

SEQ ID NO: 6398 - DNA, 15 bp, synthetic construct
  source 1..15: mol_type = other DNA
ttggagcacaaagac

SEQ ID NO: 6399 - DNA, 15 bp, synthetic construct
  source 1..15: mol_type = other DNA
gtttaagtccacgtt

SEQ ID NO: 6400 - DNA, 15 bp, synthetic construct
  source 1..15: mol_type = other DNA
tatctgtgtgtgggt

SEQ ID NO: 6401 - DNA, 15 bp, synthetic construct
  source 1..15: mol_type = other DNA
agaagtaggagcatg

SEQ ID NO: 6402 - DNA, 15 bp, synthetic construct
  source 1..15: mol_type = other DNA
tcacaggtgctactg

SEQ ID NO: 6403 - DNA, 15 bp, synthetic construct
  source 1..15: mol_type = other DNA
ccatgacgctctctg

SEQ ID NO: 6404 - DNA, 15 bp, synthetic construct
  source 1..15: mol_type = other DNA
gggtgcggatgatga

SEQ ID NO: 6405 - DNA, 15 bp, synthetic construct
  source 1..15: mol_type = other DNA
gagagtttgtttgac

SEQ ID NO: 6406 - DNA, 15 bp, synthetic construct
  source 1..15: mol_type = other DNA
catgatagggaggaa

SEQ ID NO: 6407 - DNA, 15 bp, synthetic construct
  source 1..15: mol_type = other DNA
agcttgaagagatcg

SEQ ID NO: 6408 - DNA, 15 bp, synthetic construct
  source 1..15: mol_type = other DNA
cctaaatcctcaggg

SEQ ID NO: 6409 - DNA, 15 bp, synthetic construct
  source 1..15: mol_type = other DNA
ctggaagactatgaa

SEQ ID NO: 6410 - DNA, 15 bp, synthetic construct
  source 1..15: mol_type = other DNA
agtttttggtttagg

SEQ ID NO: 6411 - DNA, 15 bp, synthetic construct
  source 1..15: mol_type = other DNA
gtatcggtcatggtc

SEQ ID NO: 6412 - DNA, 15 bp, synthetic construct
  source 1..15: mol_type = other DNA
gtccctgtgacaaag

SEQ ID NO: 6413 - DNA, 15 bp, synthetic construct
  source 1..15: mol_type = other DNA
ctggtctgagcattt

SEQ ID NO: 6414 - DNA, 15 bp, synthetic construct
  source 1..15: mol_type = other DNA
agagcactgtggcta

SEQ ID NO: 6415 - DNA, 15 bp, synthetic construct
  source 1..15: mol_type = other DNA
cactgtggtgttgtc

SEQ ID NO: 6416 - DNA, 15 bp, synthetic construct
  source 1..15: mol_type = other DNA
gatgagagagcatcg

SEQ ID NO: 6417 - DNA, 15 bp, synthetic construct
  source 1..15: mol_type = other DNA
gtcgtaggcgatgtt

SEQ ID NO: 6418 - DNA, 15 bp, synthetic construct
  source 1..15: mol_type = other DNA
caccgaagacccagg

SEQ ID NO: 6419 - DNA, 15 bp, synthetic construct
  source 1..15: mol_type = other DNA
agagattgtgaacct

SEQ ID NO: 6420 - DNA, 15 bp, synthetic construct
  source 1..15: mol_type = other DNA
ttcagtctgttgcag

SEQ ID NO: 6421 - DNA, 15 bp, synthetic construct
  source 1..15: mol_type = other DNA
acgttgcgtaggcgc

SEQ ID NO: 6422 - DNA, 15 bp, synthetic construct
  source 1..15: mol_type = other DNA
ccttgaccgtgtcag

SEQ ID NO: 6423 - DNA, 15 bp, synthetic construct
  source 1..15: mol_type = other DNA
ccttgtcttggttta

SEQ ID NO: 6424 - DNA, 15 bp, synthetic construct
  source 1..15: mol_type = other DNA
gccaaggcagtttga

SEQ ID NO: 6425 - DNA, 15 bp, synthetic construct
  source 1..15: mol_type = other DNA
cgccggcatggatct

SEQ ID NO: 6426 - DNA, 15 bp, synthetic construct
  source 1..15: mol_type = other DNA
tgcttgggcaatgct

SEQ ID NO: 6427 - DNA, 15 bp, synthetic construct
  source 1..15: mol_type = other DNA
cggagaagttgcaga

SEQ ID NO: 6428 - DNA, 15 bp, synthetic construct
  source 1..15: mol_type = other DNA
gcgtcagttccttga

SEQ ID NO: 6429 - DNA, 15 bp, synthetic construct
  source 1..15: mol_type = other DNA
cagctcacaaggttc

SEQ ID NO: 6430 - DNA, 15 bp, synthetic construct
  source 1..15: mol_type = other DNA
gcctctgacagttta

SEQ ID NO: 6431 - DNA, 15 bp, synthetic construct
  source 1..15: mol_type = other DNA
gcatggtgccggtta

SEQ ID NO: 6432 - DNA, 15 bp, synthetic construct
  source 1..15: mol_type = other DNA
cgcgaacctgttcgc

SEQ ID NO: 6433 - DNA, 15 bp, synthetic construct
  source 1..15: mol_type = other DNA
cagtccaggattgtc

SEQ ID NO: 6434 - DNA, 15 bp, synthetic construct
  source 1..15: mol_type = other DNA
aagtgctttagcttc

SEQ ID NO: 6435 - DNA, 15 bp, synthetic construct
  source 1..15: mol_type = other DNA
ccattcctgtgttgc

SEQ ID NO: 6436 - DNA, 15 bp, synthetic construct
  source 1..15: mol_type = other DNA
agcccagcgaacgac

SEQ ID NO: 6437 - DNA, 15 bp, synthetic construct
  source 1..15: mol_type = other DNA
ttgaattggtcgaaa

SEQ ID NO: 6438 - DNA, 15 bp, synthetic construct
  source 1..15: mol_type = other DNA
catggtcgataagtc

SEQ ID NO: 6439 - DNA, 15 bp, synthetic construct
  source 1..15: mol_type = other DNA
atcgacgcgctttag

SEQ ID NO: 6440 - DNA, 15 bp, synthetic construct
  source 1..15: mol_type = other DNA
gaccacatgcatctc

SEQ ID NO: 6441 - DNA, 15 bp, synthetic construct
  source 1..15: mol_type = other DNA
gaagggattcccgtc

SEQ ID NO: 6442 - DNA, 15 bp, synthetic construct
  source 1..15: mol_type = other DNA
caagaaacatgatcc

SEQ ID NO: 6443 - DNA, 15 bp, synthetic construct
  source 1..15: mol_type = other DNA
aggcggagtcaactc

SEQ ID NO: 6444 - DNA, 15 bp, synthetic construct
  source 1..15: mol_type = other DNA
gccgtgtgaatggca

SEQ ID NO: 6445 - DNA, 15 bp, synthetic construct
  source 1..15: mol_type = other DNA
gcagcactgaaatca

SEQ ID NO: 6446 - DNA, 15 bp, synthetic construct
  source 1..15: mol_type = other DNA
tgaagggactcaagt

SEQ ID NO: 6447 - DNA, 15 bp, synthetic construct
  source 1..15: mol_type = other DNA
gaaccagagaaactg

SEQ ID NO: 6448 - DNA, 15 bp, synthetic construct
  source 1..15: mol_type = other DNA
acagcactttcttct

SEQ ID NO: 6449 - DNA, 15 bp, synthetic construct
  source 1..15: mol_type = other DNA
acgatgaattgcacg

SEQ ID NO: 6450 - DNA, 15 bp, synthetic construct
  source 1..15: mol_type = other DNA
ttcacttcattgagc

SEQ ID NO: 6451 - DNA, 15 bp, synthetic construct
  source 1..15: mol_type = other DNA
tgtcacacaccttcc

SEQ ID NO: 6452 - DNA, 15 bp, synthetic construct
  source 1..15: mol_type = other DNA
ctggttacaaatcac

SEQ ID NO: 6453 - DNA, 15 bp, synthetic construct
  source 1..15: mol_type = other DNA
agaaccagtggcatt

SEQ ID NO: 6454 - DNA, 15 bp, synthetic construct
  source 1..15: mol_type = other DNA
ctgaacattcagtga

SEQ ID NO: 6455 - DNA, 15 bp, synthetic construct
  source 1..15: mol_type = other DNA
ctccatttaccaggc

SEQ ID NO: 6456 - DNA, 15 bp, synthetic construct
  source 1..15: mol_type = other DNA
ccagagtcttcaagt

SEQ ID NO: 6457 - DNA, 15 bp, synthetic construct
  source 1..15: mol_type = other DNA
cagtggtttcagaca

SEQ ID NO: 6458 - DNA, 15 bp, synthetic construct
  source 1..15: mol_type = other DNA
ccaacagaacaaccc

SEQ ID NO: 6459 - DNA, 15 bp, synthetic construct
  source 1..15: mol_type = other DNA
gttgttgacacacca

SEQ ID NO: 6460 - DNA, 15 bp, synthetic construct
  source 1..15: mol_type = other DNA
tttccttttcagtgt

SEQ ID NO: 6461 - DNA, 15 bp, synthetic construct
  source 1..15: mol_type = other DNA
tcttcatagtgatca

SEQ ID NO: 6462 - DNA, 15 bp, synthetic construct
  source 1..15: mol_type = other DNA
gaacatgtcacgcca

SEQ ID NO: 6463 - DNA, 15 bp, synthetic construct
  source 1..15: mol_type = other DNA
gatcatcaaaccaga

SEQ ID NO: 6464 - DNA, 15 bp, synthetic construct
  source 1..15: mol_type = other DNA
ctctaagtcttagct

SEQ ID NO: 6465 - DNA, 15 bp, synthetic construct
  source 1..15: mol_type = other DNA
tccagatcatctgca

SEQ ID NO: 6466 - DNA, 15 bp, synthetic construct
  source 1..15: mol_type = other DNA
cccatctgttgagag

SEQ ID NO: 6467 - DNA, 15 bp, synthetic construct
  source 1..15: mol_type = other DNA
gacccgtctccatta

SEQ ID NO: 6468 - DNA, 15 bp, synthetic construct
  source 1..15: mol_type = other DNA
ggtgtgaatcttggg

SEQ ID NO: 6469 - DNA, 15 bp, synthetic construct
  source 1..15: mol_type = other DNA
ccaggccacctaggt

SEQ ID NO: 6470 - DNA, 15 bp, synthetic construct
  source 1..15: mol_type = other DNA
agagacagcacgttc

SEQ ID NO: 6471 - DNA, 15 bp, synthetic construct
  source 1..15: mol_type = other DNA
aggctgagttttaag

SEQ ID NO: 6472 - DNA, 15 bp, synthetic construct
  source 1..15: mol_type = other DNA
cacaagggaacacag

SEQ ID NO: 6473 - DNA, 15 bp, synthetic construct
  source 1..15: mol_type = other DNA
agggcggtctttggc

SEQ ID NO: 6474 - DNA, 15 bp, synthetic construct
  source 1..15: mol_type = other DNA
gcccatcgggattat

SEQ ID NO: 6475 - DNA, 15 bp, synthetic construct
  source 1..15: mol_type = other DNA
gaatgacatggtcag

SEQ ID NO: 6476 - DNA, 15 bp, synthetic construct
  source 1..15: mol_type = other DNA
actggaagtgtcact

SEQ ID NO: 6477 - DNA, 15 bp, synthetic construct
  source 1..15: mol_type = other DNA
gattcctctcatatc

SEQ ID NO: 6478 - DNA, 15 bp, synthetic construct
  source 1..15: mol_type = other DNA
atcatctgctcgagg

SEQ ID NO: 6479 - DNA, 15 bp, synthetic construct
  source 1..15: mol_type = other DNA
tatccctctgtacct

SEQ ID NO: 6480 - DNA, 15 bp, synthetic construct
  source 1..15: mol_type = other DNA
tgacgccttcatact

SEQ ID NO: 6481 - DNA, 15 bp, synthetic construct
  source 1..15: mol_type = other DNA
ccaccagtttagaag

SEQ ID NO: 6482 - DNA, 15 bp, synthetic construct
  source 1..15: mol_type = other DNA
cctaaagggactaaa

SEQ ID NO: 6483 - DNA, 15 bp, synthetic construct
  source 1..15: mol_type = other DNA
ttgctcctgttcatt

SEQ ID NO: 6484 - DNA, 15 bp, synthetic construct
  source 1..15: mol_type = other DNA
ctgaagataccatgt

SEQ ID NO: 6485 - DNA, 15 bp, synthetic construct
  source 1..15: mol_type = other DNA
tcttgaatctcccga

SEQ ID NO: 6486 - DNA, 15 bp, synthetic construct
  source 1..15: mol_type = other DNA
taaggagaaaatgag

SEQ ID NO: 6487 - DNA, 15 bp, synthetic construct
  source 1..15: mol_type = other DNA
gacaaatgagaagat

SEQ ID NO: 6488 - DNA, 15 bp, synthetic construct
  source 1..15: mol_type = other DNA
cccaagagaaatcgg

SEQ ID NO: 6489 - DNA, 15 bp, synthetic construct
  source 1..15: mol_type = other DNA
gacgggatggcatca

SEQ ID NO: 6490 - DNA, 15 bp, synthetic construct
  source 1..15: mol_type = other DNA
gcaggaaaggcacat

SEQ ID NO: 6491 - DNA, 15 bp, synthetic construct
  source 1..15: mol_type = other DNA
ggcacccatgttgta

SEQ ID NO: 6492 - DNA, 15 bp, synthetic construct
  source 1..15: mol_type = other DNA
cagcccgctttcacc

SEQ ID NO: 6493 - DNA, 15 bp, synthetic construct
  source 1..15: mol_type = other DNA
ggaccagttatgcag

SEQ ID NO: 6494 - DNA, 15 bp, synthetic construct
  source 1..15: mol_type = other DNA
tgggttcagtatggg

SEQ ID NO: 6495 - DNA, 15 bp, synthetic construct
  source 1..15: mol_type = other DNA
accaaggcaatccaa

SEQ ID NO: 6496 - DNA, 15 bp, synthetic construct
  source 1..15: mol_type = other DNA
aatccgttgaaagct

SEQ ID NO: 6497 - DNA, 15 bp, synthetic construct
  source 1..15: mol_type = other DNA
tctgcaccactgatc

SEQ ID NO: 6498 - DNA, 15 bp, synthetic construct
  source 1..15: mol_type = other DNA
ttgtcttccatatac

SEQ ID NO: 6499 - DNA, 15 bp, synthetic construct
  source 1..15: mol_type = other DNA
gctttgggtagaagc

SEQ ID NO: 6500 - DNA, 15 bp, synthetic construct
  source 1..15: mol_type = other DNA
gactattagaatcac

SEQ ID NO: 6501 - DNA, 15 bp, synthetic construct
  source 1..15: mol_type = other DNA
ccaaccctgaggacc

SEQ ID NO: 6502 - DNA, 15 bp, synthetic construct
  source 1..15: mol_type = other DNA
agcaaacattgcaac

SEQ ID NO: 6503 - DNA, 15 bp, synthetic construct
  source 1..15: mol_type = other DNA
tccgactcctctgtt

SEQ ID NO: 6504 - DNA, 15 bp, synthetic construct
  source 1..15: mol_type = other DNA
gggacgatgactagg

SEQ ID NO: 6505 - DNA, 15 bp, synthetic construct
  source 1..15: mol_type = other DNA
atacaagtccaggag

SEQ ID NO: 6506 - DNA, 15 bp, synthetic construct
  source 1..15: mol_type = other DNA
tctaagatttctgtg

SEQ ID NO: 6507 - DNA, 15 bp, synthetic construct
  source 1..15: mol_type = other DNA
gagctcttcatgcaa

SEQ ID NO: 6508 - DNA, 15 bp, synthetic construct
  source 1..15: mol_type = other DNA
atttatcgcatctac

SEQ ID NO: 6509 - DNA, 15 bp, synthetic construct
  source 1..15: mol_type = other DNA
catggctgagttcga

SEQ ID NO: 6510 - DNA, 15 bp, synthetic construct
  source 1..15: mol_type = other DNA
cacttttactcacag

SEQ ID NO: 6511 - DNA, 15 bp, synthetic construct
  source 1..15: mol_type = other DNA
gaagctggctacaaa

SEQ ID NO: 6512 - DNA, 15 bp, synthetic construct
  source 1..15: mol_type = other DNA
ctcgacactggattc

SEQ ID NO: 6513 - DNA, 15 bp, synthetic construct
  source 1..15: mol_type = other DNA
gagggcagaaatcca

SEQ ID NO: 6514 - DNA, 15 bp, synthetic construct
  source 1..15: mol_type = other DNA
tacaggtttaattcg

SEQ ID NO: 6515 - DNA, 15 bp, synthetic construct
  source 1..15: mol_type = other DNA
aaaacgagcagtgcc

SEQ ID NO: 6516 - DNA, 15 bp, synthetic construct
  source 1..15: mol_type = other DNA
ctccacatatgccaa

SEQ ID NO: 6517 - DNA, 15 bp, synthetic construct
  source 1..15: mol_type = other DNA
taagcagataggctg

SEQ ID NO: 6518 - DNA, 15 bp, synthetic construct
  source 1..15: mol_type = other DNA
aggaggtgacaatgt

SEQ ID NO: 6519 - DNA, 15 bp, synthetic construct
  source 1..15: mol_type = other DNA
aggtttccaaggcat

SEQ ID NO: 6520 - DNA, 15 bp, synthetic construct
  source 1..15: mol_type = other DNA
ctaggaatgtccaag

SEQ ID NO: 6521 - DNA, 15 bp, synthetic construct
  source 1..15: mol_type = other DNA
gaccctctgagaaag

SEQ ID NO: 6522 - DNA, 15 bp, synthetic construct
  source 1..15: mol_type = other DNA
ttttccaacttgcca

SEQ ID NO: 6523 - DNA, 15 bp, synthetic construct
  source 1..15: mol_type = other DNA
tgaggagaccaaaaa

SEQ ID NO: 6524 - DNA, 15 bp, synthetic construct
  source 1..15: mol_type = other DNA
ttgtagatatcctga

SEQ ID NO: 6525 - DNA, 15 bp, synthetic construct
  source 1..15: mol_type = other DNA
tgctgtgcacttgaa

SEQ ID NO: 6526 - DNA, 15 bp, synthetic construct
  source 1..15: mol_type = other DNA
tattgcttctcctta

SEQ ID NO: 6527 - DNA, 15 bp, synthetic construct
  source 1..15: mol_type = other DNA
tcctcgctcgaggtt

SEQ ID NO: 6528 - DNA, 15 bp, synthetic construct
  source 1..15: mol_type = other DNA
cttcatcttgtcctt

SEQ ID NO: 6529 - DNA, 15 bp, synthetic construct
  source 1..15: mol_type = other DNA
aacacagaaagcaaa

SEQ ID NO: 6530 - DNA, 15 bp, synthetic construct
  source 1..15: mol_type = other DNA
ctgtgacacgtgcat

SEQ ID NO: 6531 - DNA, 15 bp, synthetic construct
  source 1..15: mol_type = other DNA
ctgatatttgggtcg

SEQ ID NO: 6532 - DNA, 15 bp, synthetic construct
  source 1..15: mol_type = other DNA
ctgggcagttatagg

SEQ ID NO: 6533 - DNA, 15 bp, synthetic construct
  source 1..15: mol_type = other DNA
acagtctgtgtgtga

SEQ ID NO: 6534 - DNA, 15 bp, synthetic construct
  source 1..15: mol_type = other DNA
caaaacagactcaac

SEQ ID NO: 6535 - DNA, 15 bp, synthetic construct
  source 1..15: mol_type = other DNA
ccgggacggttagga

SEQ ID NO: 6536 - DNA, 15 bp, synthetic construct
  source 1..15: mol_type = other DNA
ccaggatcgaaccat

SEQ ID NO: 6537 - DNA, 15 bp, synthetic construct
  source 1..15: mol_type = other DNA
tcgcctttcatccca

SEQ ID NO: 6538 - DNA, 15 bp, synthetic construct
  source 1..15: mol_type = other DNA
ctggacaacagacag

SEQ ID NO: 6539 - DNA, 15 bp, synthetic construct
  source 1..15: mol_type = other DNA
ggccacgtctcttgt

SEQ ID NO: 6540 - DNA, 15 bp, synthetic construct
  source 1..15: mol_type = other DNA
acaccatagatgaag

SEQ ID NO: 6541 - DNA, 15 bp, synthetic construct
  source 1..15: mol_type = other DNA
aagtcttagctcttg

SEQ ID NO: 6542 - DNA, 15 bp, synthetic construct
  source 1..15: mol_type = other DNA
tgtagcacatggtac

SEQ ID NO: 6543 - DNA, 15 bp, synthetic construct
  source 1..15: mol_type = other DNA
cgctgaaagcgtgaa

SEQ ID NO: 6544 - DNA, 15 bp, synthetic construct
  source 1..15: mol_type = other DNA
ccgctccttggcaac

SEQ ID NO: 6545 - DNA, 15 bp, synthetic construct
  source 1..15: mol_type = other DNA
taatgacgcagcagt

SEQ ID NO: 6546 - DNA, 15 bp, synthetic construct
  source 1..15: mol_type = other DNA
gtgacaacagaagcc

SEQ ID NO: 6547 - DNA, 15 bp, synthetic construct
  source 1..15: mol_type = other DNA
agagtgaaccgggtt

SEQ ID NO: 6548 - DNA, 15 bp, synthetic construct
  source 1..15: mol_type = other DNA
agctcatcaaggtca

SEQ ID NO: 6549 - DNA, 15 bp, synthetic construct
  source 1..15: mol_type = other DNA
cgggttatcgcgcgt

SEQ ID NO: 6550 - DNA, 15 bp, synthetic construct
  source 1..15: mol_type = other DNA
aggaggtttcagggt

SEQ ID NO: 6551 - DNA, 15 bp, synthetic construct
  source 1..15: mol_type = other DNA
gccagggtgaaaaca

SEQ ID NO: 6552 - DNA, 15 bp, synthetic construct
  source 1..15: mol_type = other DNA
tctatatttccttcg

SEQ ID NO: 6553 - DNA, 15 bp, synthetic construct
  source 1..15: mol_type = other DNA
gctccggttttcggt

SEQ ID NO: 6554 - DNA, 15 bp, synthetic construct
  source 1..15: mol_type = other DNA
ggaagaggatcacac

SEQ ID NO: 6555 - DNA, 15 bp, synthetic construct
  source 1..15: mol_type = other DNA
gagttacagtgccga

SEQ ID NO: 6556 - DNA, 15 bp, synthetic construct
  source 1..15: mol_type = other DNA
ccattgcgacaggca

SEQ ID NO: 6557 - DNA, 15 bp, synthetic construct
  source 1..15: mol_type = other DNA
ctttattttgcccgt

SEQ ID NO: 6558 - DNA, 15 bp, synthetic construct
  source 1..15: mol_type = other DNA
cctgagacgaccgag

SEQ ID NO: 6559 - DNA, 15 bp, synthetic construct
  source 1..15: mol_type = other DNA
tctcgaaaaggcact

SEQ ID NO: 6560 - DNA, 15 bp, synthetic construct
  source 1..15: mol_type = other DNA
caaggatgcgaataa

SEQ ID NO: 6561 - DNA, 15 bp, synthetic construct
  source 1..15: mol_type = other DNA
ctgacaagaggatgg

SEQ ID NO: 6562 - DNA, 15 bp, synthetic construct
  source 1..15: mol_type = other DNA
gatcacactgagcag

SEQ ID NO: 6563 - DNA, 15 bp, synthetic construct
  source 1..15: mol_type = other DNA
cacctcatccatatt

SEQ ID NO: 6564 - DNA, 15 bp, synthetic construct
  source 1..15: mol_type = other DNA
cagccaggtctaatt

SEQ ID NO: 6565 - DNA, 15 bp, synthetic construct
  source 1..15: mol_type = other DNA
ttaaacggaagatga

SEQ ID NO: 6566 - DNA, 15 bp, synthetic construct
  source 1..15: mol_type = other DNA
ccaaccgtcccagac

SEQ ID NO: 6567 - DNA, 15 bp, synthetic construct
  source 1..15: mol_type = other DNA
ttgctcacatctgta

SEQ ID NO: 6568 - DNA, 15 bp, synthetic construct
  source 1..15: mol_type = other DNA
actcaggacttgatg

SEQ ID NO: 6569 - DNA, 15 bp, synthetic construct
  source 1..15: mol_type = other DNA
tttcatttggaggat

SEQ ID NO: 6570 - DNA, 15 bp, synthetic construct
  source 1..15: mol_type = other DNA
cctctgctttcgcca

SEQ ID NO: 6571 - DNA, 15 bp, synthetic construct
  source 1..15: mol_type = other DNA
atttcacatctgtga

SEQ ID NO: 6572 - DNA, 15 bp, synthetic construct
  source 1..15: mol_type = other DNA
cagcctgacatgtca

SEQ ID NO: 6573 - DNA, 15 bp, synthetic construct
  source 1..15: mol_type = other DNA
cttctttgagtttgt

SEQ ID NO: 6574 - DNA, 15 bp, synthetic construct
  source 1..15: mol_type = other DNA
gtggcattcaagggt

SEQ ID NO: 6575 - DNA, 15 bp, synthetic construct
  source 1..15: mol_type = other DNA
aatggacatgctggt

SEQ ID NO: 6576 - DNA, 15 bp, synthetic construct
  source 1..15: mol_type = other DNA
gttgttgtgttgatt

SEQ ID NO: 6577 - DNA, 15 bp, synthetic construct
  source 1..15: mol_type = other DNA
ctctaccacatatag

SEQ ID NO: 6578 - DNA, 15 bp, synthetic construct
  source 1..15: mol_type = other DNA
ctctgtctgtagcta

SEQ ID NO: 6579 - DNA, 15 bp, synthetic construct
  source 1..15: mol_type = other DNA
gaatgaaaggcagta

SEQ ID NO: 6580 - DNA, 15 bp, synthetic construct
  source 1..15: mol_type = other DNA
ttcagctgtatggtt

SEQ ID NO: 6581 - DNA, 15 bp, synthetic construct
  source 1..15: mol_type = other DNA
aaatggaacagatac

SEQ ID NO: 6582 - DNA, 15 bp, synthetic construct
  source 1..15: mol_type = other DNA
caacagggtggttac

SEQ ID NO: 6583 - DNA, 15 bp, synthetic construct
  source 1..15: mol_type = other DNA
tagcagtcaaggtac

SEQ ID NO: 6584 - DNA, 15 bp, synthetic construct
  source 1..15: mol_type = other DNA
aggcataataagatg

SEQ ID NO: 6585 - DNA, 15 bp, synthetic construct
  source 1..15: mol_type = other DNA
caccatagctgatca

SEQ ID NO: 6586 - DNA, 15 bp, synthetic construct
  source 1..15: mol_type = other DNA
gactttcacagtaat

SEQ ID NO: 6587 - DNA, 15 bp, synthetic construct
  source 1..15: mol_type = other DNA
atagactgagtagac

SEQ ID NO: 6588 - DNA, 15 bp, synthetic construct
  source 1..15: mol_type = other DNA
tgtgcacatcaaaca

SEQ ID NO: 6589 - DNA, 15 bp, synthetic construct
  source 1..15: mol_type = other DNA
agcaggatgacttgg

SEQ ID NO: 6590 - DNA, 15 bp, synthetic construct
  source 1..15: mol_type = other DNA
aaaacaggaaggaaa

SEQ ID NO: 6591 - DNA, 15 bp, synthetic construct
  source 1..15: mol_type = other DNA
tggaatgtaagcgga

SEQ ID NO: 6592 - DNA, 15 bp, synthetic construct
  source 1..15: mol_type = other DNA
aactgtgcaccagct

SEQ ID NO: 6593 - DNA, 15 bp, synthetic construct
  source 1..15: mol_type = other DNA
ggtctgtgtatcgca

SEQ ID NO: 6594 - DNA, 15 bp, synthetic construct
  source 1..15: mol_type = other DNA
ggaataaactcctgt

SEQ ID NO: 6595 - DNA, 15 bp, synthetic construct
  source 1..15: mol_type = other DNA
cggtggcttcgttaa

SEQ ID NO: 6596 - DNA, 15 bp, synthetic construct
  source 1..15: mol_type = other DNA
cagcgctgccgaaat

SEQ ID NO: 6597 - DNA, 15 bp, synthetic construct
  source 1..15: mol_type = other DNA
cctaacacagtgctg

SEQ ID NO: 6598 - DNA, 15 bp, synthetic construct
  source 1..15: mol_type = other DNA
tggtgatgtggtcag

SEQ ID NO: 6599 - DNA, 15 bp, synthetic construct
  source 1..15: mol_type = other DNA
gcacaaacagcctct

SEQ ID NO: 6600 - DNA, 15 bp, synthetic construct
  source 1..15: mol_type = other DNA
gtttgatctttctcc

SEQ ID NO: 6601 - DNA, 15 bp, synthetic construct
  source 1..15: mol_type = other DNA
gtatcacggccattg

SEQ ID NO: 6602 - DNA, 15 bp, synthetic construct
  source 1..15: mol_type = other DNA
aatgactatggacat

SEQ ID NO: 6603 - DNA, 15 bp, synthetic construct
  source 1..15: mol_type = other DNA
atgctctgggtaaga

SEQ ID NO: 6604 - DNA, 15 bp, synthetic construct
  source 1..15: mol_type = other DNA
gggtgtgatggtgac

SEQ ID NO: 6605 - DNA, 15 bp, synthetic construct
  source 1..15: mol_type = other DNA
gaagttgaagagggc

SEQ ID NO: 6606 - DNA, 15 bp, synthetic construct
  source 1..15: mol_type = other DNA
aatgtatgtactgtg

SEQ ID NO: 6607 - DNA, 15 bp, synthetic construct
  source 1..15: mol_type = other DNA
tctgagaagaaaaga

SEQ ID NO: 6608 - DNA, 15 bp, synthetic construct
  source 1..15: mol_type = other DNA
cctggacagacattt

SEQ ID NO: 6609 - DNA, 15 bp, synthetic construct
  source 1..15: mol_type = other DNA
cccggaatctgaccc

SEQ ID NO: 6610 - DNA, 15 bp, synthetic construct
  source 1..15: mol_type = other DNA
gaacgtctgaagtct

SEQ ID NO: 6611 - DNA, 15 bp, synthetic construct
  source 1..15: mol_type = other DNA
ctaagctgacacttt

SEQ ID NO: 6612 - DNA, 15 bp, synthetic construct
  source 1..15: mol_type = other DNA
acaaggcatcctgac

SEQ ID NO: 6613 - DNA, 15 bp, synthetic construct
  source 1..15: mol_type = other DNA
atccagtcctttgtg

SEQ ID NO: 6614 - DNA, 15 bp, synthetic construct
  source 1..15: mol_type = other DNA
aggagcgataggctg

SEQ ID NO: 6615 - DNA, 15 bp, synthetic construct
  source 1..15: mol_type = other DNA
agtcactcgagaaaa

SEQ ID NO: 6616 - DNA, 15 bp, synthetic construct
  source 1..15: mol_type = other DNA
atctttgtcctgacg

SEQ ID NO: 6617 - DNA, 15 bp, synthetic construct
  source 1..15: mol_type = other DNA
ctttcacatggataa

SEQ ID NO: 6618 - DNA, 15 bp, synthetic construct
  source 1..15: mol_type = other DNA
ctttattggcaccat

SEQ ID NO: 6619 - DNA, 15 bp, synthetic construct
  source 1..15: mol_type = other DNA
ccctcattaaaatag

SEQ ID NO: 6620 - DNA, 15 bp, synthetic construct
  source 1..15: mol_type = other DNA
actgttactagcaag

SEQ ID NO: 6621 - DNA, 15 bp, synthetic construct
  source 1..15: mol_type = other DNA
ctgctgggagtaatt

SEQ ID NO: 6622 - DNA, 15 bp, synthetic construct
  source 1..15: mol_type = other DNA
tgaagggaataagtt

SEQ ID NO: 6623 - DNA, 15 bp, synthetic construct
  source 1..15: mol_type = other DNA
taactgaagcatgaa

SEQ ID NO: 6624 - DNA, 15 bp, synthetic construct
  source 1..15: mol_type = other DNA
aaaagggcttagaag

SEQ ID NO: 6625 - DNA, 15 bp, synthetic construct
  source 1..15: mol_type = other DNA
gcctgagagtctccg

SEQ ID NO: 6626 - DNA, 15 bp, synthetic construct
  source 1..15: mol_type = other DNA
acccgaagtgtgagg

SEQ ID NO: 6627 - DNA, 15 bp, synthetic construct
  source 1..15: mol_type = other DNA
aacacataggtaagc

SEQ ID NO: 6628 - DNA, 15 bp, synthetic construct
  source 1..15: mol_type = other DNA
cagctaaggttgacc

SEQ ID NO: 6629 - DNA, 15 bp, synthetic construct
  source 1..15: mol_type = other DNA
tgtctaggtaaggag

SEQ ID NO: 6630 - DNA, 15 bp, synthetic construct
  source 1..15: mol_type = other DNA
tctcctatggacgct

SEQ ID NO: 6631 - DNA, 15 bp, synthetic construct
  source 1..15: mol_type = other DNA
tacctgatattgctt

SEQ ID NO: 6632 - DNA, 15 bp, synthetic construct
  source 1..15: mol_type = other DNA
tggaggtagaatgtc

SEQ ID NO: 6633 - DNA, 15 bp, synthetic construct
  source 1..15: mol_type = other DNA
caagcatgggcgact

SEQ ID NO: 6634 - DNA, 15 bp, synthetic construct
  source 1..15: mol_type = other DNA
acctctttctataca

SEQ ID NO: 6635 - DNA, 15 bp, synthetic construct
  source 1..15: mol_type = other DNA
tttaacactttggga

SEQ ID NO: 6636 - DNA, 15 bp, synthetic construct
  source 1..15: mol_type = other DNA
gggtgattatgagca

SEQ ID NO: 6637 - DNA, 15 bp, synthetic construct
  source 1..15: mol_type = other DNA
ccgaaagaagtatga

SEQ ID NO: 6638 - DNA, 15 bp, synthetic construct
  source 1..15: mol_type = other DNA
gccatgtaccagaca

SEQ ID NO: 6639 - DNA, 15 bp, synthetic construct
  source 1..15: mol_type = other DNA
tgcttcctgactgac

SEQ ID NO: 6640 - DNA, 15 bp, synthetic construct
  source 1..15: mol_type = other DNA
ccgtagtcacaccag

SEQ ID NO: 6641 - DNA, 15 bp, synthetic construct
  source 1..15: mol_type = other DNA
tgcagccagaaattt

SEQ ID NO: 6642 - DNA, 15 bp, synthetic construct
  source 1..15: mol_type = other DNA
gatttgattccacga

SEQ ID NO: 6643 - DNA, 15 bp, synthetic construct
  source 1..15: mol_type = other DNA
aacccattgcctgtg

SEQ ID NO: 6644 - DNA, 15 bp, synthetic construct
  source 1..15: mol_type = other DNA
agacaaagagcgagc

SEQ ID NO: 6645 - DNA, 15 bp, synthetic construct
  source 1..15: mol_type = other DNA
gttctaagtagccaa

SEQ ID NO: 6646 - DNA, 15 bp, synthetic construct
  source 1..15: mol_type = other DNA
ttgaggtttcagtgg

SEQ ID NO: 6647 - DNA, 15 bp, synthetic construct
  source 1..15: mol_type = other DNA
ctgacctctgagtat

SEQ ID NO: 6648 - DNA, 15 bp, synthetic construct
  source 1..15: mol_type = other DNA
ctggaaagataccag

SEQ ID NO: 6649 - DNA, 15 bp, synthetic construct
  source 1..15: mol_type = other DNA
aagttgagggaagca

SEQ ID NO: 6650 - DNA, 15 bp, synthetic construct
  source 1..15: mol_type = other DNA
gcttaccctgtcttg

SEQ ID NO: 6651 - DNA, 15 bp, synthetic construct
  source 1..15: mol_type = other DNA
ccggccaagaaacta

SEQ ID NO: 6652 - DNA, 15 bp, synthetic construct
  source 1..15: mol_type = other DNA
aggtttttggagtgg

SEQ ID NO: 6653 - DNA, 15 bp, synthetic construct
  source 1..15: mol_type = other DNA
tgtagaggatgtgga

SEQ ID NO: 6654 - DNA, 15 bp, synthetic construct
  source 1..15: mol_type = other DNA
aagaaaatggagaca

SEQ ID NO: 6655 - DNA, 15 bp, synthetic construct
  source 1..15: mol_type = other DNA
agcatccctatgaga

SEQ ID NO: 6656 - DNA, 15 bp, synthetic construct
  source 1..15: mol_type = other DNA
cttgtcgtagtaggg

SEQ ID NO: 6657 - DNA, 15 bp, synthetic construct
  source 1..15: mol_type = other DNA
gctggatcctttatt

SEQ ID NO: 6658 - DNA, 15 bp, synthetic construct
  source 1..15: mol_type = other DNA
caaaccagtcaatct

SEQ ID NO: 6659 - DNA, 15 bp, synthetic construct
  source 1..15: mol_type = other DNA
gccctgagtcaattt

SEQ ID NO: 6660 - DNA, 15 bp, synthetic construct
  source 1..15: mol_type = other DNA
ggcttcaaggttgtc

SEQ ID NO: 6661 - DNA, 15 bp, synthetic construct
  source 1..15: mol_type = other DNA
gcaaggctagtgcta

SEQ ID NO: 6662 - DNA, 15 bp, synthetic construct
  source 1..15: mol_type = other DNA
acacaaactgtgaca

SEQ ID NO: 6663 - DNA, 15 bp, synthetic construct
  source 1..15: mol_type = other DNA
gtacttccaagggta

SEQ ID NO: 6664 - DNA, 15 bp, synthetic construct
  source 1..15: mol_type = other DNA
gcggcgattcatcag

SEQ ID NO: 6665 - DNA, 15 bp, synthetic construct
  source 1..15: mol_type = other DNA
agcaaactcagcaag

SEQ ID NO: 6666 - DNA, 15 bp, synthetic construct
  source 1..15: mol_type = other DNA
cacacgtttacccaa

SEQ ID NO: 6667 - DNA, 15 bp, synthetic construct
  source 1..15: mol_type = other DNA
gggtgtgtgaccatc

SEQ ID NO: 6668 - DNA, 15 bp, synthetic construct
  source 1..15: mol_type = other DNA
ctgattacagaggtc

SEQ ID NO: 6669 - DNA, 15 bp, synthetic construct
  source 1..15: mol_type = other DNA
accagtgcaatcagg

SEQ ID NO: 6670 - DNA, 15 bp, synthetic construct
  source 1..15: mol_type = other DNA
ggattaatctaccta

SEQ ID NO: 6671 - DNA, 15 bp, synthetic construct
  source 1..15: mol_type = other DNA
ctggtggcttgcaac

SEQ ID NO: 6672 - DNA, 15 bp, synthetic construct
  source 1..15: mol_type = other DNA
cggctcctagagaga

SEQ ID NO: 6673 - DNA, 15 bp, synthetic construct
  source 1..15: mol_type = other DNA
gttctgttggccaag

SEQ ID NO: 6674 - DNA, 15 bp, synthetic construct
  source 1..15: mol_type = other DNA
agcagagatctactg

SEQ ID NO: 6675 - DNA, 15 bp, synthetic construct
  source 1..15: mol_type = other DNA
ctttctcttcagtcc

SEQ ID NO: 6676 - DNA, 15 bp, synthetic construct
  source 1..15: mol_type = other DNA
gggtaggtaactctg

SEQ ID NO: 6677 - DNA, 15 bp, synthetic construct
  source 1..15: mol_type = other DNA
aggagaagatgatgt

SEQ ID NO: 6678 - DNA, 15 bp, synthetic construct
  source 1..15: mol_type = other DNA
tctctcgggaacacc

SEQ ID NO: 6679 - DNA, 15 bp, synthetic construct
  source 1..15: mol_type = other DNA
caaaaaaggtggagg

SEQ ID NO: 6680 - DNA, 15 bp, synthetic construct
  source 1..15: mol_type = other DNA
ggtgctttttcataa

SEQ ID NO: 6681 - DNA, 15 bp, synthetic construct
  source 1..15: mol_type = other DNA
tgcctgaacagccct

SEQ ID NO: 6682 - DNA, 15 bp, synthetic construct
  source 1..15: mol_type = other DNA
ggcttcccttaacac

SEQ ID NO: 6683 - DNA, 15 bp, synthetic construct
  source 1..15: mol_type = other DNA
aaggacctctttgct

SEQ ID NO: 6684 - DNA, 15 bp, synthetic construct
  source 1..15: mol_type = other DNA
gcgtcctgggttaca

SEQ ID NO: 6685 - DNA, 15 bp, synthetic construct
  source 1..15: mol_type = other DNA
tggttacctccagag

SEQ ID NO: 6686 - DNA, 15 bp, synthetic construct
  source 1..15: mol_type = other DNA
atagttgtctgggtt

SEQ ID NO: 6687 - DNA, 15 bp, synthetic construct
  source 1..15: mol_type = other DNA
cagccagattgagaa

SEQ ID NO: 6688 - DNA, 15 bp, synthetic construct
  source 1..15: mol_type = other DNA
tccgacttccttgaa

SEQ ID NO: 6689 - DNA, 15 bp, synthetic construct
  source 1..15: mol_type = other DNA
agaaagcactctaca

SEQ ID NO: 6690 - DNA, 15 bp, synthetic construct
  source 1..15: mol_type = other DNA
ccattaatcatgtcg

SEQ ID NO: 6691 - DNA, 15 bp, synthetic construct
  source 1..15: mol_type = other DNA
tttgcatttgctgat

SEQ ID NO: 6692 - DNA, 15 bp, synthetic construct
  source 1..15: mol_type = other DNA
attctgcaggaaagt

SEQ ID NO: 6693 - DNA, 15 bp, synthetic construct
  source 1..15: mol_type = other DNA
gcaacaaacatcacc

SEQ ID NO: 6694 - DNA, 15 bp, synthetic construct
  source 1..15: mol_type = other DNA
caggtctccaactgg

SEQ ID NO: 6695 - DNA, 15 bp, synthetic construct
  source 1..15: mol_type = other DNA
tccacggcatagcag

SEQ ID NO: 6696 - DNA, 15 bp, synthetic construct
  source 1..15: mol_type = other DNA
ccagctcctttgaga

SEQ ID NO: 6697 - DNA, 15 bp, synthetic construct
  source 1..15: mol_type = other DNA
tggaagaacaaatct

SEQ ID NO: 6698 - DNA, 15 bp, synthetic construct
  source 1..15: mol_type = other DNA
atggatccctatagc

SEQ ID NO: 6699 - DNA, 15 bp, synthetic construct
  source 1..15: mol_type = other DNA
acatcaggacttgca

SEQ ID NO: 6700 - DNA, 15 bp, synthetic construct
  source 1..15: mol_type = other DNA
tgcaatacctggctt

SEQ ID NO: 6701 - DNA, 15 bp, synthetic construct
  source 1..15: mol_type = other DNA
acttctgaacatgtt

SEQ ID NO: 6702 - DNA, 15 bp, synthetic construct
  source 1..15: mol_type = other DNA
acagttccggtcaca

SEQ ID NO: 6703 - DNA, 15 bp, synthetic construct
  source 1..15: mol_type = other DNA
accaataggttgacc

SEQ ID NO: 6704 - DNA, 15 bp, synthetic construct
  source 1..15: mol_type = other DNA
ctgatagtgaaggtt

SEQ ID NO: 6705 - DNA, 15 bp, synthetic construct
  source 1..15: mol_type = other DNA
aaaacagaccaactg

SEQ ID NO: 6706 - DNA, 15 bp, synthetic construct
  source 1..15: mol_type = other DNA
ggctctcaacccttc

SEQ ID NO: 6707 - DNA, 15 bp, synthetic construct
  source 1..15: mol_type = other DNA
caaagattttactgc

SEQ ID NO: 6708 - DNA, 15 bp, synthetic construct
  source 1..15: mol_type = other DNA
tttccagaatactga

SEQ ID NO: 6709 - DNA, 15 bp, synthetic construct
  source 1..15: mol_type = other DNA
tgcaaggtacggtct

SEQ ID NO: 6710 - DNA, 15 bp, synthetic construct
  source 1..15: mol_type = other DNA
caccgccttgcgcta

SEQ ID NO: 6711 - DNA, 15 bp, synthetic construct
  source 1..15: mol_type = other DNA
tctagtgtctgaacc

SEQ ID NO: 6712 - DNA, 15 bp, synthetic construct
  source 1..15: mol_type = other DNA
agcatttagtacaga

SEQ ID NO: 6713 - DNA, 15 bp, synthetic construct
  source 1..15: mol_type = other DNA
gtggctgatagtctt

SEQ ID NO: 6714 - DNA, 15 bp, synthetic construct
  source 1..15: mol_type = other DNA
taaccacttttcagc

SEQ ID NO: 6715 - DNA, 15 bp, synthetic construct
  source 1..15: mol_type = other DNA
atcgattccagctct

SEQ ID NO: 6716 - DNA, 15 bp, synthetic construct
  source 1..15: mol_type = other DNA
caagacagagttggg

SEQ ID NO: 6717 - DNA, 15 bp, synthetic construct
  source 1..15: mol_type = other DNA
accgggctgaactcg

SEQ ID NO: 6718 - DNA, 15 bp, synthetic construct
  source 1..15: mol_type = other DNA
tcatcagcaaggtag

SEQ ID NO: 6719 - DNA, 15 bp, synthetic construct
  source 1..15: mol_type = other DNA
ggaatcttctcttcc

SEQ ID NO: 6720 - DNA, 15 bp, synthetic construct
  source 1..15: mol_type = other DNA
gaatttcagtgtact

SEQ ID NO: 6721 - DNA, 15 bp, synthetic construct
  source 1..15: mol_type = other DNA
ggcaaagatacccac

SEQ ID NO: 6722 - DNA, 15 bp, synthetic construct
  source 1..15: mol_type = other DNA
atgcacccttgaaag

SEQ ID NO: 6723 - DNA, 15 bp, synthetic construct
  source 1..15: mol_type = other DNA
gaagtgttgaattca

SEQ ID NO: 6724 - DNA, 15 bp, synthetic construct
  source 1..15: mol_type = other DNA
ggctagtgaagaatc

SEQ ID NO: 6725 - DNA, 15 bp, synthetic construct
  source 1..15: mol_type = other DNA
agcaaggactcgatg

SEQ ID NO: 6726 - DNA, 15 bp, synthetic construct
  source 1..15: mol_type = other DNA
gaaataataccaacc

SEQ ID NO: 6727 - DNA, 15 bp, synthetic construct
  source 1..15: mol_type = other DNA
gtgtgaactgatggg

SEQ ID NO: 6728 - DNA, 15 bp, synthetic construct
  source 1..15: mol_type = other DNA
actggctcagatctc

SEQ ID NO: 6729 - DNA, 15 bp, synthetic construct
  source 1..15: mol_type = other DNA
aggaggaataaggca

SEQ ID NO: 6730 - DNA, 15 bp, synthetic construct
  source 1..15: mol_type = other DNA
aagacattctgcagg

SEQ ID NO: 6731 - DNA, 15 bp, synthetic construct
  source 1..15: mol_type = other DNA
agcaaagcagaagac

SEQ ID NO: 6732 - DNA, 15 bp, synthetic construct
  source 1..15: mol_type = other DNA
gccagagagaaacgt

SEQ ID NO: 6733 - DNA, 15 bp, synthetic construct
  source 1..15: mol_type = other DNA
agtcttgtaatgtct

SEQ ID NO: 6734 - DNA, 15 bp, synthetic construct
  source 1..15: mol_type = other DNA
tcctcaagttcctct

SEQ ID NO: 6735 - DNA, 15 bp, synthetic construct
  source 1..15: mol_type = other DNA
cagcggaactcatcc

SEQ ID NO: 6736 - DNA, 15 bp, synthetic construct
  source 1..15: mol_type = other DNA
ctacccatgtgatgc

SEQ ID NO: 6737 - DNA, 15 bp, synthetic construct
  source 1..15: mol_type = other DNA
gtcccattacaccta

SEQ ID NO: 6738 - DNA, 15 bp, synthetic construct
  source 1..15: mol_type = other DNA
ctcaggttcacttgt

SEQ ID NO: 6739 - DNA, 15 bp, synthetic construct
  source 1..15: mol_type = other DNA
gaacttgcacggtag

SEQ ID NO: 6740 - DNA, 15 bp, synthetic construct
  source 1..15: mol_type = other DNA
ggctgtactgagcat

SEQ ID NO: 6741 - DNA, 15 bp, synthetic construct
  source 1..15: mol_type = other DNA
ggtcattcctcaaca

SEQ ID NO: 6742 - DNA, 15 bp, synthetic construct
  source 1..15: mol_type = other DNA
ggtacagttggtaat

SEQ ID NO: 6743 - DNA, 15 bp, synthetic construct
  source 1..15: mol_type = other DNA
tgacaattgtggcca

SEQ ID NO: 6744 - DNA, 15 bp, synthetic construct
  source 1..15: mol_type = other DNA
ccctcaggtagagat

SEQ ID NO: 6745 - DNA, 15 bp, synthetic construct
  source 1..15: mol_type = other DNA
gaacggagaagttac

SEQ ID NO: 6746 - DNA, 15 bp, synthetic construct
  source 1..15: mol_type = other DNA
tctgaaaattccttc

SEQ ID NO: 6747 - DNA, 15 bp, synthetic construct
  source 1..15: mol_type = other DNA
gcctatgtttttatc

SEQ ID NO: 6748 - DNA, 15 bp, synthetic construct
  source 1..15: mol_type = other DNA
gagggctgcaaaagg

SEQ ID NO: 6749 - DNA, 15 bp, synthetic construct
  source 1..15: mol_type = other DNA
cttggcctttctatt

SEQ ID NO: 6750 - DNA, 15 bp, synthetic construct
  source 1..15: mol_type = other DNA
atactttgggatggg

SEQ ID NO: 6751 - DNA, 15 bp, synthetic construct
  source 1..15: mol_type = other DNA
gtcagatgcgtctct

SEQ ID NO: 6752 - DNA, 15 bp, synthetic construct
  source 1..15: mol_type = other DNA
tgtgttgccatagta

SEQ ID NO: 6753 - DNA, 15 bp, synthetic construct
  source 1..15: mol_type = other DNA
gattctctctcgtgg

SEQ ID NO: 6754 - DNA, 15 bp, synthetic construct
  source 1..15: mol_type = other DNA
atgcaaatgaccatc

SEQ ID NO: 6755 - DNA, 15 bp, synthetic construct
  source 1..15: mol_type = other DNA
gcccgactgcatctt

SEQ ID NO: 6756 - DNA, 15 bp, synthetic construct
  source 1..15: mol_type = other DNA
gaggaagcagcaata

SEQ ID NO: 6757 - DNA, 15 bp, synthetic construct
  source 1..15: mol_type = other DNA
gggtgtgactactga

SEQ ID NO: 6758 - DNA, 15 bp, synthetic construct
  source 1..15: mol_type = other DNA
ggcatgtcaatatta

SEQ ID NO: 6759 - DNA, 15 bp, synthetic construct
  source 1..15: mol_type = other DNA
ggcctctgtcaacat

SEQ ID NO: 6760 - DNA, 15 bp, synthetic construct
  source 1..15: mol_type = other DNA
caggacgtggaaatg

SEQ ID NO: 6761 - DNA, 15 bp, synthetic construct
  source 1..15: mol_type = other DNA
atccgaacactagca

SEQ ID NO: 6762 - DNA, 15 bp, synthetic construct
  source 1..15: mol_type = other DNA
tggcaaattggcggg

SEQ ID NO: 6763 - DNA, 15 bp, synthetic construct
  source 1..15: mol_type = other DNA
cctgatttccctgtg

SEQ ID NO: 6764 - DNA, 15 bp, synthetic construct
  source 1..15: mol_type = other DNA
accagaagcaagtgc

SEQ ID NO: 6765 - DNA, 15 bp, synthetic construct
  source 1..15: mol_type = other DNA
tccagtttcaaactc

SEQ ID NO: 6766 - DNA, 15 bp, synthetic construct
  source 1..15: mol_type = other DNA
accacgatgtctatt

SEQ ID NO: 6767 - DNA, 15 bp, synthetic construct
  source 1..15: mol_type = other DNA
cctgggtaacccgtt

SEQ ID NO: 6768 - DNA, 15 bp, synthetic construct
  source 1..15: mol_type = other DNA
gacagtgcatgtcca

SEQ ID NO: 6769 - DNA, 15 bp, synthetic construct
  source 1..15: mol_type = other DNA
agcttttcaactgta

SEQ ID NO: 6770 - DNA, 15 bp, synthetic construct
  source 1..15: mol_type = other DNA
gggaaagtttccttg

SEQ ID NO: 6771 - DNA, 15 bp, synthetic construct
  source 1..15: mol_type = other DNA
agccgtgtggcattt

SEQ ID NO: 6772 - DNA, 15 bp, synthetic construct
  source 1..15: mol_type = other DNA
gacacagaagaagat

SEQ ID NO: 6773 - DNA, 15 bp, synthetic construct
  source 1..15: mol_type = other DNA
agtcagcgcgatcat

SEQ ID NO: 6774 - DNA, 15 bp, synthetic construct
  source 1..15: mol_type = other DNA
ggagggtgctttgtt

SEQ ID NO: 6775 - DNA, 15 bp, synthetic construct
  source 1..15: mol_type = other DNA
cgtctttcttgcccg

SEQ ID NO: 6776 - DNA, 15 bp, synthetic construct
  source 1..15: mol_type = other DNA
tctcatcaccaccag

SEQ ID NO: 6777 - DNA, 15 bp, synthetic construct
  source 1..15: mol_type = other DNA
ccagtagggacctga

SEQ ID NO: 6778 - DNA, 15 bp, synthetic construct
  source 1..15: mol_type = other DNA
gaggagtctcttgat

SEQ ID NO: 6779 - DNA, 15 bp, synthetic construct
  source 1..15: mol_type = other DNA
taggattcctggacc

SEQ ID NO: 6780 - DNA, 15 bp, synthetic construct
  source 1..15: mol_type = other DNA
cttcttctgggaagc

SEQ ID NO: 6781 - DNA, 15 bp, synthetic construct
  source 1..15: mol_type = other DNA
tgtatgtttttaccc

SEQ ID NO: 6782 - DNA, 15 bp, synthetic construct
  source 1..15: mol_type = other DNA
ttagttaagaaggag

SEQ ID NO: 6783 - DNA, 15 bp, synthetic construct
  source 1..15: mol_type = other DNA
cccaggagaaacaat

SEQ ID NO: 6784 - DNA, 15 bp, synthetic construct
  source 1..15: mol_type = other DNA
gtgcagatggtgtct

SEQ ID NO: 6785 - DNA, 15 bp, synthetic construct
  source 1..15: mol_type = other DNA
ggcattccgtttcag

SEQ ID NO: 6786 - DNA, 15 bp, synthetic construct
  source 1..15: mol_type = other DNA
tgaccggttggcatc

SEQ ID NO: 6787 - DNA, 15 bp, synthetic construct
  source 1..15: mol_type = other DNA
tgcaatgggcatctg

SEQ ID NO: 6788 - DNA, 15 bp, synthetic construct
  source 1..15: mol_type = other DNA
ggacgcactgcagag

SEQ ID NO: 6789 - DNA, 15 bp, synthetic construct
  source 1..15: mol_type = other DNA
agtatttgtgctggt

SEQ ID NO: 6790 - DNA, 15 bp, synthetic construct
  source 1..15: mol_type = other DNA
gcctctgtctttaat

SEQ ID NO: 6791 - DNA, 15 bp, synthetic construct
  source 1..15: mol_type = other DNA
ggtgaagtgagaggt

SEQ ID NO: 6792 - DNA, 15 bp, synthetic construct
  source 1..15: mol_type = other DNA
gatgacacattggag

SEQ ID NO: 6793 - DNA, 15 bp, synthetic construct
  source 1..15: mol_type = other DNA
cagacaacatcagtc

SEQ ID NO: 6794 - DNA, 15 bp, synthetic construct
  source 1..15: mol_type = other DNA
tccatacccatcatt

SEQ ID NO: 6795 - DNA, 15 bp, synthetic construct
  source 1..15: mol_type = other DNA
gcaccaaactgctgg

SEQ ID NO: 6796 - DNA, 15 bp, synthetic construct
  source 1..15: mol_type = other DNA
gtgtctaggaattcg

SEQ ID NO: 6797 - DNA, 15 bp, synthetic construct
  source 1..15: mol_type = other DNA
aggactcaccacaga

SEQ ID NO: 6798 - DNA, 15 bp, synthetic construct
  source 1..15: mol_type = other DNA
tgcactgagatgcga

SEQ ID NO: 6799 - DNA, 15 bp, synthetic construct
  source 1..15: mol_type = other DNA
taggtactgtttttc

SEQ ID NO: 6800 - DNA, 15 bp, synthetic construct
  source 1..15: mol_type = other DNA
aagccaaatctccct

SEQ ID NO: 6801 - DNA, 15 bp, synthetic construct
  source 1..15: mol_type = other DNA
tcaccactcttcgag

SEQ ID NO: 6802 - DNA, 15 bp, synthetic construct
  source 1..15: mol_type = other DNA
ggctggcacaaagaa

SEQ ID NO: 6803 - DNA, 15 bp, synthetic construct
  source 1..15: mol_type = other DNA
ggacagttaagcagc

SEQ ID NO: 6804 - DNA, 15 bp, synthetic construct
  source 1..15: mol_type = other DNA
caggaagatcgtcgg

SEQ ID NO: 6805 - DNA, 15 bp, synthetic construct
  source 1..15: mol_type = other DNA
gtaaggataaggatc

SEQ ID NO: 6806 - DNA, 15 bp, synthetic construct
  source 1..15: mol_type = other DNA
tctgagtaagattct

SEQ ID NO: 6807 - DNA, 15 bp, synthetic construct
  source 1..15: mol_type = other DNA
aaggccataggaacc

SEQ ID NO: 6808 - DNA, 15 bp, synthetic construct
  source 1..15: mol_type = other DNA
ctcttatggagcagg

SEQ ID NO: 6809 - DNA, 15 bp, synthetic construct
  source 1..15: mol_type = other DNA
agccttcaaactggc

SEQ ID NO: 6810 - DNA, 15 bp, synthetic construct
  source 1..15: mol_type = other DNA
tttccagggttacca

SEQ ID NO: 6811 - DNA, 15 bp, synthetic construct
  source 1..15: mol_type = other DNA
tcaccctcatctata

SEQ ID NO: 6812 - DNA, 15 bp, synthetic construct
  source 1..15: mol_type = other DNA
tccttgtcttttaac

SEQ ID NO: 6813 - DNA, 15 bp, synthetic construct
  source 1..15: mol_type = other DNA
agcttcccgattgga

SEQ ID NO: 6814 - DNA, 15 bp, synthetic construct
  source 1..15: mol_type = other DNA
caagtgaatggattg

SEQ ID NO: 6815 - DNA, 15 bp, synthetic construct
  source 1..15: mol_type = other DNA
tttcggttctccact

SEQ ID NO: 6816 - DNA, 15 bp, synthetic construct
  source 1..15: mol_type = other DNA
taaggaggatcctag

SEQ ID NO: 6817 - DNA, 15 bp, synthetic construct
  source 1..15: mol_type = other DNA
atcagtcacattgac

SEQ ID NO: 6818 - DNA, 15 bp, synthetic construct
  source 1..15: mol_type = other DNA
agaagactgtcaaag

SEQ ID NO: 6819 - DNA, 15 bp, synthetic construct
  source 1..15: mol_type = other DNA
cattatccatggaaa

SEQ ID NO: 6820 - DNA, 15 bp, synthetic construct
  source 1..15: mol_type = other DNA
cacttattacagttc

SEQ ID NO: 6821 - DNA, 15 bp, synthetic construct
  source 1..15: mol_type = other DNA
tacacagcaaaaagt

SEQ ID NO: 6822 - DNA, 15 bp, synthetic construct
  source 1..15: mol_type = other DNA
tgggcttaaccgctg

SEQ ID NO: 6823 - DNA, 15 bp, synthetic construct
  source 1..15: mol_type = other DNA
aatacagtcatttcg

SEQ ID NO: 6824 - DNA, 15 bp, synthetic construct
  source 1..15: mol_type = other DNA
tggaaacaatggaga

SEQ ID NO: 6825 - DNA, 15 bp, synthetic construct
  source 1..15: mol_type = other DNA
cttttcataggactc

SEQ ID NO: 6826 - DNA, 15 bp, synthetic construct
  source 1..15: mol_type = other DNA
ggtggaaagaagaga

SEQ ID NO: 6827 - DNA, 15 bp, synthetic construct
  source 1..15: mol_type = other DNA
gagtttgagtaagcc

SEQ ID NO: 6828 - DNA, 15 bp, synthetic construct
  source 1..15: mol_type = other DNA
gactgacaaagggaa

SEQ ID NO: 6829 - DNA, 15 bp, synthetic construct
  source 1..15: mol_type = other DNA
ccaagccttcatgtg

SEQ ID NO: 6830 - DNA, 15 bp, synthetic construct
  source 1..15: mol_type = other DNA
tcaccaaatgcacca

SEQ ID NO: 6831 - DNA, 15 bp, synthetic construct
  source 1..15: mol_type = other DNA
gtgaggatgtacacc

SEQ ID NO: 6832 - DNA, 15 bp, synthetic construct
  source 1..15: mol_type = other DNA
tctcaaatccgatgc

SEQ ID NO: 6833 - DNA, 15 bp, synthetic construct
  source 1..15: mol_type = other DNA
cttgcctcttggttg

SEQ ID NO: 6834 - DNA, 15 bp, synthetic construct
  source 1..15: mol_type = other DNA
tgtcggtgatccagg

SEQ ID NO: 6835 - DNA, 15 bp, synthetic construct
  source 1..15: mol_type = other DNA
gggttgaagaaatca

SEQ ID NO: 6836 - DNA, 15 bp, synthetic construct
  source 1..15: mol_type = other DNA
cagctgtcataaact

SEQ ID NO: 6837 - DNA, 15 bp, synthetic construct
  source 1..15: mol_type = other DNA
ctttctggacatagc

SEQ ID NO: 6838 - DNA, 15 bp, synthetic construct
  source 1..15: mol_type = other DNA
gctgcgtgccaccaa

SEQ ID NO: 6839 - DNA, 15 bp, synthetic construct
  source 1..15: mol_type = other DNA
aggttgtgtttgctc

SEQ ID NO: 6840 - DNA, 15 bp, synthetic construct
  source 1..15: mol_type = other DNA
ttccttctgggtagc

SEQ ID NO: 6841 - DNA, 15 bp, synthetic construct
  source 1..15: mol_type = other DNA
tgtggttgtctgaag

SEQ ID NO: 6842 - DNA, 15 bp, synthetic construct
  source 1..15: mol_type = other DNA
aggctgaagcgttat

SEQ ID NO: 6843 - DNA, 15 bp, synthetic construct
  source 1..15: mol_type = other DNA
tgtggtcaaaagccc

SEQ ID NO: 6844 - DNA, 15 bp, synthetic construct
  source 1..15: mol_type = other DNA
tccttcataagcagt

SEQ ID NO: 6845 - DNA, 15 bp, synthetic construct
  source 1..15: mol_type = other DNA
aggtctgtgactgat

SEQ ID NO: 6846 - DNA, 15 bp, synthetic construct
  source 1..15: mol_type = other DNA
aggttgaaaacagtg

SEQ ID NO: 6847 - DNA, 15 bp, synthetic construct
  source 1..15: mol_type = other DNA
agggattaggctatg

SEQ ID NO: 6848 - DNA, 15 bp, synthetic construct
  source 1..15: mol_type = other DNA
ggtgctggagataaa

SEQ ID NO: 6849 - DNA, 15 bp, synthetic construct
  source 1..15: mol_type = other DNA
ggtgtttggcgatat

SEQ ID NO: 6850 - DNA, 15 bp, synthetic construct
  source 1..15: mol_type = other DNA
cgactgttgactgca

SEQ ID NO: 6851 - DNA, 15 bp, synthetic construct
  source 1..15: mol_type = other DNA
atctgattcagatcc

SEQ ID NO: 6852 - DNA, 15 bp, synthetic construct
  source 1..15: mol_type = other DNA
acgattgacattaga

SEQ ID NO: 6853 - DNA, 15 bp, synthetic construct
  source 1..15: mol_type = other DNA
tggcaatgacgaagg

SEQ ID NO: 6854 - DNA, 15 bp, synthetic construct
  source 1..15: mol_type = other DNA
tactaaagtcagtgg

SEQ ID NO: 6855 - DNA, 15 bp, synthetic construct
  source 1..15: mol_type = other DNA
cacgtaagggtctca

SEQ ID NO: 6856 - DNA, 15 bp, synthetic construct
  source 1..15: mol_type = other DNA
cgtatacttcagtag

SEQ ID NO: 6857 - DNA, 15 bp, synthetic construct
  source 1..15: mol_type = other DNA
caccgggactagcga

SEQ ID NO: 6858 - DNA, 15 bp, synthetic construct
  source 1..15: mol_type = other DNA
tgggacgaaaagaat

SEQ ID NO: 6859 - DNA, 15 bp, synthetic construct
  source 1..15: mol_type = other DNA
ctcagtccaaccaca

SEQ ID NO: 6860 - DNA, 15 bp, synthetic construct
  source 1..15: mol_type = other DNA
tggcataaaagaggc

SEQ ID NO: 6861 - DNA, 15 bp, synthetic construct
  source 1..15: mol_type = other DNA
ttgtgctagagctaa

SEQ ID NO: 6862 - DNA, 15 bp, synthetic construct
  source 1..15: mol_type = other DNA
tgtgtgtgagacagc

SEQ ID NO: 6863 - DNA, 15 bp, synthetic construct
  source 1..15: mol_type = other DNA
gccatggtgcttaaa

SEQ ID NO: 6864 - DNA, 15 bp, synthetic construct
  source 1..15: mol_type = other DNA
cagacacctctcagc

SEQ ID NO: 6865 - DNA, 15 bp, synthetic construct
  source 1..15: mol_type = other DNA
ctgtagaagtcacaa

SEQ ID NO: 6866 - DNA, 15 bp, synthetic construct
  source 1..15: mol_type = other DNA
cccagaacaggagta

SEQ ID NO: 6867 - DNA, 15 bp, synthetic construct
  source 1..15: mol_type = other DNA
cctaggaggttgtat

SEQ ID NO: 6868 - DNA, 15 bp, synthetic construct
  source 1..15: mol_type = other DNA
caatggatggatgag

SEQ ID NO: 6869 - DNA, 15 bp, synthetic construct
  source 1..15: mol_type = other DNA
attgttttctcatcc

SEQ ID NO: 6870 - DNA, 15 bp, synthetic construct
  source 1..15: mol_type = other DNA
agctccatcaaaggt

SEQ ID NO: 6871 - DNA, 15 bp, synthetic construct
  source 1..15: mol_type = other DNA
ttagctcgatgatcg

SEQ ID NO: 6872 - DNA, 15 bp, synthetic construct
  source 1..15: mol_type = other DNA
aaacggttgcccgac

SEQ ID NO: 6873 - DNA, 15 bp, synthetic construct
  source 1..15: mol_type = other DNA
cttactactctccaa

SEQ ID NO: 6874 - DNA, 15 bp, synthetic construct
  source 1..15: mol_type = other DNA
ggtaaacattgttac

SEQ ID NO: 6875 - DNA, 15 bp, synthetic construct
  source 1..15: mol_type = other DNA
taacaaagcatggaa

SEQ ID NO: 6876 - DNA, 15 bp, synthetic construct
  source 1..15: mol_type = other DNA
gcctgatggtgacac

SEQ ID NO: 6877 - DNA, 15 bp, synthetic construct
  source 1..15: mol_type = other DNA
gcatgaatccaaagc

SEQ ID NO: 6878 - DNA, 15 bp, synthetic construct
  source 1..15: mol_type = other DNA
ctggtgaaagaatga

SEQ ID NO: 6879 - DNA, 15 bp, synthetic construct
  source 1..15: mol_type = other DNA
tggagatctcgaagg

SEQ ID NO: 6880 - DNA, 15 bp, synthetic construct
  source 1..15: mol_type = other DNA
gccatgacaagctgg

SEQ ID NO: 6881 - DNA, 15 bp, synthetic construct
  source 1..15: mol_type = other DNA
cttggaaaggaggaa

SEQ ID NO: 6882 - DNA, 15 bp, synthetic construct
  source 1..15: mol_type = other DNA
ggttttcagtgcagt

SEQ ID NO: 6883 - DNA, 15 bp, synthetic construct
  source 1..15: mol_type = other DNA
ccgtggcatttccat

SEQ ID NO: 6884 - DNA, 15 bp, synthetic construct
  source 1..15: mol_type = other DNA
aggtatttgcagtga

SEQ ID NO: 6885 - DNA, 15 bp, synthetic construct
  source 1..15: mol_type = other DNA
ccaagaaggatcagg

SEQ ID NO: 6886 - DNA, 15 bp, synthetic construct
  source 1..15: mol_type = other DNA
gtaggagattggtga

SEQ ID NO: 6887 - DNA, 15 bp, synthetic construct
  source 1..15: mol_type = other DNA
tgattttttgtgagg

SEQ ID NO: 6888 - DNA, 15 bp, synthetic construct
  source 1..15: mol_type = other DNA
gggaaccattggtcc

SEQ ID NO: 6889 - DNA, 15 bp, synthetic construct
  source 1..15: mol_type = other DNA
acacattgtactcca

SEQ ID NO: 6890 - DNA, 15 bp, synthetic construct
  source 1..15: mol_type = other DNA
gggttaagaagagag

SEQ ID NO: 6891 - DNA, 15 bp, synthetic construct
  source 1..15: mol_type = other DNA
tcttggtagtcctgt

SEQ ID NO: 6892 - DNA, 15 bp, synthetic construct
  source 1..15: mol_type = other DNA
gcagtgataaaaggg

SEQ ID NO: 6893 - DNA, 15 bp, synthetic construct
  source 1..15: mol_type = other DNA
tccggatgatgcaga

SEQ ID NO: 6894 - DNA, 15 bp, synthetic construct
  source 1..15: mol_type = other DNA
aggagtaggtaggtc

SEQ ID NO: 6895 - DNA, 15 bp, synthetic construct
  source 1..15: mol_type = other DNA
ttgttggatgaactg

SEQ ID NO: 6896 - DNA, 15 bp, synthetic construct
  source 1..15: mol_type = other DNA
gagccagttgcgtgt

SEQ ID NO: 6897 - DNA, 15 bp, synthetic construct
  source 1..15: mol_type = other DNA
gctctctgtaaccgt

SEQ ID NO: 6898 - DNA, 15 bp, synthetic construct
  source 1..15: mol_type = other DNA
cctgggttgtgtaca

SEQ ID NO: 6899 - DNA, 15 bp, synthetic construct
  source 1..15: mol_type = other DNA
ccgacacatcaaagg

SEQ ID NO: 6900 - DNA, 15 bp, synthetic construct
  source 1..15: mol_type = other DNA
gtgtttcgggaaggc

SEQ ID NO: 6901 - DNA, 15 bp, synthetic construct
  source 1..15: mol_type = other DNA
cttgtgactcaggtt

SEQ ID NO: 6902 - DNA, 15 bp, synthetic construct
  source 1..15: mol_type = other DNA
tgtagtgggttaacg

SEQ ID NO: 6903 - DNA, 15 bp, synthetic construct
  source 1..15: mol_type = other DNA
agggcttgcatgaac

SEQ ID NO: 6904 - DNA, 15 bp, synthetic construct
  source 1..15: mol_type = other DNA
agaaaaagctcaatg

SEQ ID NO: 6905 - DNA, 15 bp, synthetic construct
  source 1..15: mol_type = other DNA
ctgggcgtctacttg

SEQ ID NO: 6906 - DNA, 15 bp, synthetic construct
  source 1..15: mol_type = other DNA
gtacaaccttggtgg

SEQ ID NO: 6907 - DNA, 15 bp, synthetic construct
  source 1..15: mol_type = other DNA
tgtgtgattcagctg

SEQ ID NO: 6908 - DNA, 15 bp, synthetic construct
  source 1..15: mol_type = other DNA
atgccgtaagaagca

SEQ ID NO: 6909 - DNA, 15 bp, synthetic construct
  source 1..15: mol_type = other DNA
tctctgttctgcaaa

SEQ ID NO: 6910 - DNA, 15 bp, synthetic construct
  source 1..15: mol_type = other DNA
acaaaaccagtaact

SEQ ID NO: 6911 - DNA, 15 bp, synthetic construct
  source 1..15: mol_type = other DNA
gcagatcaccaagcc

SEQ ID NO: 6912 - DNA, 15 bp, synthetic construct
  source 1..15: mol_type = other DNA
tgtgtaccatgtaga

SEQ ID NO: 6913 - DNA, 15 bp, synthetic construct
  source 1..15: mol_type = other DNA
agatgtggaagtgaa

SEQ ID NO: 6914 - DNA, 15 bp, synthetic construct
  source 1..15: mol_type = other DNA
gtcatgttgccatac

SEQ ID NO: 6915 - DNA, 15 bp, synthetic construct
  source 1..15: mol_type = other DNA
aggatggaaaagcct

SEQ ID NO: 6916 - DNA, 15 bp, synthetic construct
  source 1..15: mol_type = other DNA
cattgttggagataa

SEQ ID NO: 6917 - DNA, 15 bp, synthetic construct
  source 1..15: mol_type = other DNA
ttcggtggagcgtca

SEQ ID NO: 6918 - DNA, 15 bp, synthetic construct
  source 1..15: mol_type = other DNA
catggtgttcttaag

SEQ ID NO: 6919 - DNA, 15 bp, synthetic construct
  source 1..15: mol_type = other DNA
agccggtttgaaacc

SEQ ID NO: 6920 - DNA, 15 bp, synthetic construct
  source 1..15: mol_type = other DNA
gactgctggtatgac

SEQ ID NO: 6921 - DNA, 15 bp, synthetic construct
  source 1..15: mol_type = other DNA
attatcactaagtgg

SEQ ID NO: 6922 - DNA, 15 bp, synthetic construct
  source 1..15: mol_type = other DNA
gcggctctgcaagga

SEQ ID NO: 6923 - DNA, 15 bp, synthetic construct
  source 1..15: mol_type = other DNA
atgtcctcatacatg

SEQ ID NO: 6924 - DNA, 15 bp, synthetic construct
  source 1..15: mol_type = other DNA
ttgttcacattctgg

SEQ ID NO: 6925 - DNA, 15 bp, synthetic construct
  source 1..15: mol_type = other DNA
cccaagaactcaggg

SEQ ID NO: 6926 - DNA, 15 bp, synthetic construct
  source 1..15: mol_type = other DNA
ggcgttgttgctgct

SEQ ID NO: 6927 - DNA, 15 bp, synthetic construct
  source 1..15: mol_type = other DNA
gggtgacactaacga

SEQ ID NO: 6928 - DNA, 15 bp, synthetic construct
  source 1..15: mol_type = other DNA
atcaatgatgctggg

SEQ ID NO: 6929 - DNA, 15 bp, synthetic construct
  source 1..15: mol_type = other DNA
tagaggcagcgatta

SEQ ID NO: 6930 - DNA, 15 bp, synthetic construct
  source 1..15: mol_type = other DNA
cttcatattcatccc

SEQ ID NO: 6931 - DNA, 15 bp, synthetic construct
  source 1..15: mol_type = other DNA
tgaaaggagaatgtc

SEQ ID NO: 6932 - DNA, 15 bp, synthetic construct
  source 1..15: mol_type = other DNA
aaacattgtgaccac

SEQ ID NO: 6933 - DNA, 15 bp, synthetic construct
  source 1..15: mol_type = other DNA
ctcgtatgtgccctc

SEQ ID NO: 6934 - DNA, 15 bp, synthetic construct
  source 1..15: mol_type = other DNA
ctggaaaacctccag

SEQ ID NO: 6935 - DNA, 15 bp, synthetic construct
  source 1..15: mol_type = other DNA
tatacagggcgtaca

SEQ ID NO: 6936 - DNA, 15 bp, synthetic construct
  source 1..15: mol_type = other DNA
cattttcttctcctt

SEQ ID NO: 6937 - DNA, 15 bp, synthetic construct
  source 1..15: mol_type = other DNA
gagcaggttatcagg

SEQ ID NO: 6938 - DNA, 15 bp, synthetic construct
  source 1..15: mol_type = other DNA
gagctgaaagaaatt

SEQ ID NO: 6939 - DNA, 15 bp, synthetic construct
  source 1..15: mol_type = other DNA
gcacctaagagcaga

SEQ ID NO: 6940 - DNA, 15 bp, synthetic construct
  source 1..15: mol_type = other DNA
caatccaattgctca

SEQ ID NO: 6941 - DNA, 15 bp, synthetic construct
  source 1..15: mol_type = other DNA
gaggcgacatttccc

SEQ ID NO: 6942 - DNA, 15 bp, synthetic construct
  source 1..15: mol_type = other DNA
ccaggatcacaatgg

SEQ ID NO: 6943 - DNA, 15 bp, synthetic construct
  source 1..15: mol_type = other DNA
cgctggcctttataa

SEQ ID NO: 6944 - DNA, 15 bp, synthetic construct
  source 1..15: mol_type = other DNA
caggtgttcccgctt

SEQ ID NO: 6945 - DNA, 15 bp, synthetic construct
  source 1..15: mol_type = other DNA
cagtttgctgctaac

SEQ ID NO: 6946 - DNA, 15 bp, synthetic construct
  source 1..15: mol_type = other DNA
aaagccaacaatttg

SEQ ID NO: 6947 - DNA, 15 bp, synthetic construct
  source 1..15: mol_type = other DNA
caaactgataaaggg

SEQ ID NO: 6948 - DNA, 15 bp, synthetic construct
  source 1..15: mol_type = other DNA
tttgatttcagggta

SEQ ID NO: 6949 - DNA, 15 bp, synthetic construct
  source 1..15: mol_type = other DNA
cttgatgagacacat

SEQ ID NO: 6950 - DNA, 15 bp, synthetic construct
  source 1..15: mol_type = other DNA
ttcttctccattttc

SEQ ID NO: 6951 - DNA, 15 bp, synthetic construct
  source 1..15: mol_type = other DNA
ggtaatcttgtccat

SEQ ID NO: 6952 - DNA, 15 bp, synthetic construct
  source 1..15: mol_type = other DNA
tccggttcttgtact

SEQ ID NO: 6953 - DNA, 15 bp, synthetic construct
  source 1..15: mol_type = other DNA
ttccatttactgaga

SEQ ID NO: 6954 - DNA, 15 bp, synthetic construct
  source 1..15: mol_type = other DNA
ctccaaaggttgtgg

SEQ ID NO: 6955 - DNA, 15 bp, synthetic construct
  source 1..15: mol_type = other DNA
tgagtaacatgaaca

SEQ ID NO: 6956 - DNA, 15 bp, synthetic construct
  source 1..15: mol_type = other DNA
ccaaggaacacagaa

SEQ ID NO: 6957 - DNA, 15 bp, synthetic construct
  source 1..15: mol_type = other DNA
ctgtccactgtagct

SEQ ID NO: 6958 - DNA, 15 bp, synthetic construct
  source 1..15: mol_type = other DNA
cgcgtcttgtcagtt

SEQ ID NO: 6959 - DNA, 15 bp, synthetic construct
  source 1..15: mol_type = other DNA
tttataagagttgcg

SEQ ID NO: 6960 - DNA, 15 bp, synthetic construct
  source 1..15: mol_type = other DNA
cgaatcaaaacttgt

SEQ ID NO: 6961 - DNA, 15 bp, synthetic construct
  source 1..15: mol_type = other DNA
agaagcaaagctttc

SEQ ID NO: 6962 - DNA, 15 bp, synthetic construct
  source 1..15: mol_type = other DNA
acctcctaaggctcc

SEQ ID NO: 6963 - DNA, 15 bp, synthetic construct
  source 1..15: mol_type = other DNA
ttcctgtttattcag

SEQ ID NO: 6964 - DNA, 15 bp, synthetic construct
  source 1..15: mol_type = other DNA
ttggaagtacagctg

SEQ ID NO: 6965 - DNA, 15 bp, synthetic construct
  source 1..15: mol_type = other DNA
atctggaaatgaccc

SEQ ID NO: 6966 - DNA, 15 bp, synthetic construct
  source 1..15: mol_type = other DNA
tcgtaacatcaggga

SEQ ID NO: 6967 - DNA, 15 bp, synthetic construct
  source 1..15: mol_type = other DNA
agtgtgctctgaagt

SEQ ID NO: 6968 - DNA, 15 bp, synthetic construct
  source 1..15: mol_type = other DNA
taggttctgggtaac

SEQ ID NO: 6969 - DNA, 15 bp, synthetic construct
  source 1..15: mol_type = other DNA
gtatttgcgagctcc

SEQ ID NO: 6970 - DNA, 15 bp, synthetic construct
  source 1..15: mol_type = other DNA
ccttgatctgaagat

SEQ ID NO: 6971 - DNA, 15 bp, synthetic construct
  source 1..15: mol_type = other DNA
aaataatgccaggac

SEQ ID NO: 6972 - DNA, 15 bp, synthetic construct
  source 1..15: mol_type = other DNA
tcctgtgggcttttt

SEQ ID NO: 6973 - DNA, 15 bp, synthetic construct
  source 1..15: mol_type = other DNA
ttttgagagtttgca

SEQ ID NO: 6974 - DNA, 15 bp, synthetic construct
  source 1..15: mol_type = other DNA
gccaggactgacggt

SEQ ID NO: 6975 - DNA, 15 bp, synthetic construct
  source 1..15: mol_type = other DNA
agttcttcaagagaa

SEQ ID NO: 6976 - DNA, 15 bp, synthetic construct
  source 1..15: mol_type = other DNA
cctgccaaaatacta

SEQ ID NO: 6977 - DNA, 15 bp, synthetic construct
  source 1..15: mol_type = other DNA
catcacaaagagaat

SEQ ID NO: 6978 - DNA, 15 bp, synthetic construct
  source 1..15: mol_type = other DNA
agttcagaattcatc

SEQ ID NO: 6979 - DNA, 15 bp, synthetic construct
  source 1..15: mol_type = other DNA
atgttagaaactagc

SEQ ID NO: 6980 - DNA, 15 bp, synthetic construct
  source 1..15: mol_type = other DNA
tgcaggcttcgtccg

SEQ ID NO: 6981 - DNA, 15 bp, synthetic construct
  source 1..15: mol_type = other DNA
ctgctgtgcaatgga

SEQ ID NO: 6982 - DNA, 15 bp, synthetic construct
  source 1..15: mol_type = other DNA
tctctcagcatgatt

SEQ ID NO: 6983 - DNA, 15 bp, synthetic construct
  source 1..15: mol_type = other DNA
atgaggacagatgag

SEQ ID NO: 6984 - DNA, 15 bp, synthetic construct
  source 1..15: mol_type = other DNA
ggactcaaggaatcc

SEQ ID NO: 6985 - DNA, 15 bp, synthetic construct
  source 1..15: mol_type = other DNA
tgggcttgttttggg

SEQ ID NO: 6986 - DNA, 15 bp, synthetic construct
  source 1..15: mol_type = other DNA
ttaagcaaggaagtg

SEQ ID NO: 6987 - DNA, 15 bp, synthetic construct
  source 1..15: mol_type = other DNA
gggccttagtttaac

SEQ ID NO: 6988 - DNA, 15 bp, synthetic construct
  source 1..15: mol_type = other DNA
cctcgttctctcggc

SEQ ID NO: 6989 - DNA, 15 bp, synthetic construct
  source 1..15: mol_type = other DNA
gaagaccggcacgaa

SEQ ID NO: 6990 - DNA, 15 bp, synthetic construct
  source 1..15: mol_type = other DNA
gaagtacttgttccc

SEQ ID NO: 6991 - DNA, 15 bp, synthetic construct
  source 1..15: mol_type = other DNA
gcctcggaaagaaag

SEQ ID NO: 6992 - DNA, 15 bp, synthetic construct
  source 1..15: mol_type = other DNA
ggcgcccagatgtag

SEQ ID NO: 6993 - DNA, 15 bp, synthetic construct
  source 1..15: mol_type = other DNA
aggacgaaggtgtcc

SEQ ID NO: 6994 - DNA, 15 bp, synthetic construct
  source 1..15: mol_type = other DNA
ccctttccacgccct

SEQ ID NO: 6995 - DNA, 15 bp, synthetic construct
  source 1..15: mol_type = other DNA
tgctccctcaaaagg

SEQ ID NO: 6996 - DNA, 15 bp, synthetic construct
  source 1..15: mol_type = other DNA
ttcgcatttggagga

SEQ ID NO: 6997 - DNA, 15 bp, synthetic construct
  source 1..15: mol_type = other DNA
ccctccttttcgcgg

SEQ ID NO: 6998 - DNA, 15 bp, synthetic construct
  source 1..15: mol_type = other DNA
ggctgggcttgtctc

SEQ ID NO: 6999 - DNA, 15 bp, synthetic construct
  source 1..15: mol_type = other DNA
aaaagtcatcagtga

SEQ ID NO: 7000 - DNA, 15 bp, synthetic construct
  source 1..15: mol_type = other DNA
actcagaaaagatcc

SEQ ID NO: 7001 - DNA, 15 bp, synthetic construct
  source 1..15: mol_type = other DNA
gcagtaaagggtgat

SEQ ID NO: 7002 - DNA, 15 bp, synthetic construct
  source 1..15: mol_type = other DNA
gacccttgtggtgta

SEQ ID NO: 7003 - DNA, 15 bp, synthetic construct
  source 1..15: mol_type = other DNA
gggattcattttcca

SEQ ID NO: 7004 - DNA, 15 bp, synthetic construct
  source 1..15: mol_type = other DNA
gacagaccaagaata

SEQ ID NO: 7005 - DNA, 15 bp, synthetic construct
  source 1..15: mol_type = other DNA
cattggatggcacag

SEQ ID NO: 7006 - DNA, 15 bp, synthetic construct
  source 1..15: mol_type = other DNA
gacagtgagaacaag

SEQ ID NO: 7007 - DNA, 15 bp, synthetic construct
  source 1..15: mol_type = other DNA
atcctgtgtcatttc

SEQ ID NO: 7008 - DNA, 15 bp, synthetic construct
  source 1..15: mol_type = other DNA
gaggagatccattcc

SEQ ID NO: 7009 - DNA, 15 bp, synthetic construct
  source 1..15: mol_type = other DNA
atcatacctgccagt

SEQ ID NO: 7010 - DNA, 15 bp, synthetic construct
  source 1..15: mol_type = other DNA
tcttgaaatgcagaa

SEQ ID NO: 7011 - DNA, 15 bp, synthetic construct
  source 1..15: mol_type = other DNA
gttaaagatgctgtt

SEQ ID NO: 7012 - DNA, 15 bp, synthetic construct
  source 1..15: mol_type = other DNA
gcttttgtgtgtatt

SEQ ID NO: 7013 - DNA, 15 bp, synthetic construct
  source 1..15: mol_type = other DNA
tggcaggcataggat

SEQ ID NO: 7014 - DNA, 15 bp, synthetic construct
  source 1..15: mol_type = other DNA
gtacgctgaactggc

SEQ ID NO: 7015 - DNA, 15 bp, synthetic construct
  source 1..15: mol_type = other DNA
actcatgaatagttg

SEQ ID NO: 7016 - DNA, 15 bp, synthetic construct
  source 1..15: mol_type = other DNA
ctgtatttcacattc

SEQ ID NO: 7017 - DNA, 15 bp, synthetic construct
  source 1..15: mol_type = other DNA
cagtggcgtgatctt

SEQ ID NO: 7018 - DNA, 15 bp, synthetic construct
  source 1..15: mol_type = other DNA
cctataattcgacgg

SEQ ID NO: 7019 - DNA, 15 bp, synthetic construct
  source 1..15: mol_type = other DNA
tgtgttttggtgggc

SEQ ID NO: 7020 - DNA, 15 bp, synthetic construct
  source 1..15: mol_type = other DNA
ccgtcatgctcttga

SEQ ID NO: 7021 - DNA, 15 bp, synthetic construct
  source 1..15: mol_type = other DNA
gcacctccgagaact

SEQ ID NO: 7022 - DNA, 15 bp, synthetic construct
  source 1..15: mol_type = other DNA
gggttccacatgaac

SEQ ID NO: 7023 - DNA, 15 bp, synthetic construct
  source 1..15: mol_type = other DNA
ctccatctcgatgag

SEQ ID NO: 7024 - DNA, 15 bp, synthetic construct
  source 1..15: mol_type = other DNA
gcttcagtgcgttgt

SEQ ID NO: 7025 - DNA, 15 bp, synthetic construct
  source 1..15: mol_type = other DNA
ggtcgaagagatcct

SEQ ID NO: 7026 - DNA, 15 bp, synthetic construct
  source 1..15: mol_type = other DNA
caaggctaagggctc

SEQ ID NO: 7027 - DNA, 15 bp, synthetic construct
  source 1..15: mol_type = other DNA
cttcatttctgggca

SEQ ID NO: 7028 - DNA, 15 bp, synthetic construct
  source 1..15: mol_type = other DNA
tcagcatcagcagta

SEQ ID NO: 7029 - DNA, 15 bp, synthetic construct
  source 1..15: mol_type = other DNA
ataaactctaccaag

SEQ ID NO: 7030 - DNA, 15 bp, synthetic construct
  source 1..15: mol_type = other DNA
agccgatagagaaca

SEQ ID NO: 7031 - DNA, 15 bp, synthetic construct
  source 1..15: mol_type = other DNA
tatagggaacatcca

SEQ ID NO: 7032 - DNA, 15 bp, synthetic construct
  source 1..15: mol_type = other DNA
ctgttatcaccgagg

SEQ ID NO: 7033 - DNA, 15 bp, synthetic construct
  source 1..15: mol_type = other DNA
tgacactgtccggtc

SEQ ID NO: 7034 - DNA, 15 bp, synthetic construct
  source 1..15: mol_type = other DNA
caccaccaattatgc

SEQ ID NO: 7035 - DNA, 15 bp, synthetic construct
  source 1..15: mol_type = other DNA
tggttcaaaggccta

SEQ ID NO: 7036 - DNA, 15 bp, synthetic construct
  source 1..15: mol_type = other DNA
agcgcaaatatggaa

SEQ ID NO: 7037 - DNA, 15 bp, synthetic construct
  source 1..15: mol_type = other DNA
ggccatgaatgagca

SEQ ID NO: 7038 - DNA, 15 bp, synthetic construct
  source 1..15: mol_type = other DNA
gctttggctttatcg

SEQ ID NO: 7039 - DNA, 15 bp, synthetic construct
  source 1..15: mol_type = other DNA
cccaacgcgttacct

SEQ ID NO: 7040 - DNA, 15 bp, synthetic construct
  source 1..15: mol_type = other DNA
agcagcgatcataag

SEQ ID NO: 7041 - DNA, 15 bp, synthetic construct
  source 1..15: mol_type = other DNA
tctacttgacctcag

SEQ ID NO: 7042 - DNA, 15 bp, synthetic construct
  source 1..15: mol_type = other DNA
atccagttagccgta

SEQ ID NO: 7043 - DNA, 15 bp, synthetic construct
  source 1..15: mol_type = other DNA
gaactgtgataactg

SEQ ID NO: 7044 - DNA, 15 bp, synthetic construct
  source 1..15: mol_type = other DNA
caggaaaatactaca

SEQ ID NO: 7045 - DNA, 15 bp, synthetic construct
  source 1..15: mol_type = other DNA
gacaggcacatgtaa

SEQ ID NO: 7046 - DNA, 15 bp, synthetic construct
  source 1..15: mol_type = other DNA
caggttttaattggc

SEQ ID NO: 7047 - DNA, 15 bp, synthetic construct
  source 1..15: mol_type = other DNA
ggtaggtgacagcgt

SEQ ID NO: 7048 - DNA, 15 bp, synthetic construct
  source 1..15: mol_type = other DNA
cataaggagtgggta

SEQ ID NO: 7049 - DNA, 15 bp, synthetic construct
  source 1..15: mol_type = other DNA
tccaccatgatactt

SEQ ID NO: 7050 - DNA, 15 bp, synthetic construct
  source 1..15: mol_type = other DNA
catccaataaacaga

SEQ ID NO: 7051 - DNA, 15 bp, synthetic construct
  source 1..15: mol_type = other DNA
tcggcccgtcagttc

SEQ ID NO: 7052 - DNA, 15 bp, synthetic construct
  source 1..15: mol_type = other DNA
caccttttgaggaat

SEQ ID NO: 7053 - DNA, 15 bp, synthetic construct
  source 1..15: mol_type = other DNA
cagcaacgagagctc

SEQ ID NO: 7054 - DNA, 15 bp, synthetic construct
  source 1..15: mol_type = other DNA
tcctcgtgcatgtct

SEQ ID NO: 7055 - DNA, 15 bp, synthetic construct
  source 1..15: mol_type = other DNA
gaggagccatcttgc

SEQ ID NO: 7056 - DNA, 15 bp, synthetic construct
  source 1..15: mol_type = other DNA
tgcttcacaagagct

SEQ ID NO: 7057 - DNA, 15 bp, synthetic construct
  source 1..15: mol_type = other DNA
taaaatacttccacg

SEQ ID NO: 7058 - DNA, 15 bp, synthetic construct
  source 1..15: mol_type = other DNA
ctctatttgtagcag

SEQ ID NO: 7059 - DNA, 15 bp, synthetic construct
  source 1..15: mol_type = other DNA
gtgggccttagagta

SEQ ID NO: 7060 - DNA, 15 bp, synthetic construct
  source 1..15: mol_type = other DNA
ttggctaacatggga

SEQ ID NO: 7061 - DNA, 15 bp, synthetic construct
  source 1..15: mol_type = other DNA
tgtaaagtttagcag

SEQ ID NO: 7062 - DNA, 15 bp, synthetic construct
  source 1..15: mol_type = other DNA
agtttttcttgctgc

SEQ ID NO: 7063 - DNA, 15 bp, synthetic construct
  source 1..15: mol_type = other DNA
ggattctttcgtctt

SEQ ID NO: 7064 - DNA, 15 bp, synthetic construct
  source 1..15: mol_type = other DNA
cgtatccacagactt

SEQ ID NO: 7065 - DNA, 15 bp, synthetic construct
  source 1..15: mol_type = other DNA
atttctttcagacag

SEQ ID NO: 7066 - DNA, 15 bp, synthetic construct
  source 1..15: mol_type = other DNA
aagacagacatttct

SEQ ID NO: 7067 - DNA, 15 bp, synthetic construct
  source 1..15: mol_type = other DNA
atgttgccagtctag

SEQ ID NO: 7068 - DNA, 15 bp, synthetic construct
  source 1..15: mol_type = other DNA
cttgtgtgaaagtta

SEQ ID NO: 7069 - DNA, 15 bp, synthetic construct
  source 1..15: mol_type = other DNA
gacggtgtggaagaa

SEQ ID NO: 7070 - DNA, 15 bp, synthetic construct
  source 1..15: mol_type = other DNA
tccaggaatcctagt

SEQ ID NO: 7071 - DNA, 15 bp, synthetic construct
  source 1..15: mol_type = other DNA
ctcttgactggtgtg

SEQ ID NO: 7072 - DNA, 15 bp, synthetic construct
  source 1..15: mol_type = other DNA
atgaaatcaccatca

SEQ ID NO: 7073 - DNA, 15 bp, synthetic construct
  source 1..15: mol_type = other DNA
aactacatcacctcc

SEQ ID NO: 7074 - DNA, 15 bp, synthetic construct
  source 1..15: mol_type = other DNA
tgggctatcccactg

SEQ ID NO: 7075 - DNA, 15 bp, synthetic construct
  source 1..15: mol_type = other DNA
tgacgcccaagaaaa

SEQ ID NO: 7076 - DNA, 15 bp, synthetic construct
  source 1..15: mol_type = other DNA
caattgtttggacaa

SEQ ID NO: 7077 - DNA, 15 bp, synthetic construct
  source 1..15: mol_type = other DNA
cttaatgagttttgc

SEQ ID NO: 7078 - DNA, 15 bp, synthetic construct
  source 1..15: mol_type = other DNA
aactgagagatccgc

SEQ ID NO: 7079 - DNA, 15 bp, synthetic construct
  source 1..15: mol_type = other DNA
cggtctccataaatt

SEQ ID NO: 7080 - DNA, 15 bp, synthetic construct
  source 1..15: mol_type = other DNA
gtgatgggatcagag

SEQ ID NO: 7081 - DNA, 15 bp, synthetic construct
  source 1..15: mol_type = other DNA
gctatgtaatactcc

SEQ ID NO: 7082 - DNA, 15 bp, synthetic construct
  source 1..15: mol_type = other DNA
agaaagtccctttgg

SEQ ID NO: 7083 - DNA, 15 bp, synthetic construct
  source 1..15: mol_type = other DNA
tattgacgtacttac

SEQ ID NO: 7084 - DNA, 15 bp, synthetic construct
  source 1..15: mol_type = other DNA
cgttgtatttcctgg

SEQ ID NO: 7085 - DNA, 15 bp, synthetic construct
  source 1..15: mol_type = other DNA
agcatcttccactgg

SEQ ID NO: 7086 - DNA, 15 bp, synthetic construct
  source 1..15: mol_type = other DNA
caccggaaggaacgt

SEQ ID NO: 7087 - DNA, 15 bp, synthetic construct
  source 1..15: mol_type = other DNA
ttgagtggaagaaac

SEQ ID NO: 7088 - DNA, 15 bp, synthetic construct
  source 1..15: mol_type = other DNA
tgagcctcgtgtatc

SEQ ID NO: 7089 - DNA, 15 bp, synthetic construct
  source 1..15: mol_type = other DNA
catttgccatcacag

SEQ ID NO: 7090 - DNA, 15 bp, synthetic construct
  source 1..15: mol_type = other DNA
ttcttctaggttgct

SEQ ID NO: 7091 - DNA, 15 bp, synthetic construct
  source 1..15: mol_type = other DNA
ctaggtccagaaatt

SEQ ID NO: 7092 - DNA, 15 bp, synthetic construct
  source 1..15: mol_type = other DNA
ggacacccagttaaa

SEQ ID NO: 7093 - DNA, 15 bp, synthetic construct
  source 1..15: mol_type = other DNA
ctttttgcggtattc

SEQ ID NO: 7094 - DNA, 15 bp, synthetic construct
  source 1..15: mol_type = other DNA
cggcacttgtcacac

SEQ ID NO: 7095 - DNA, 15 bp, synthetic construct
  source 1..15: mol_type = other DNA
cacaccgaatccatc

SEQ ID NO: 7096 - DNA, 15 bp, synthetic construct
  source 1..15: mol_type = other DNA
tgtccagagtggtat

SEQ ID NO: 7097 - DNA, 15 bp, synthetic construct
  source 1..15: mol_type = other DNA
aaactagatgactca

SEQ ID NO: 7098 - DNA, 15 bp, synthetic construct
  source 1..15: mol_type = other DNA
gcagatagtactggt

SEQ ID NO: 7099 - DNA, 15 bp, synthetic construct
  source 1..15: mol_type = other DNA
tgcctctcatgagaa

SEQ ID NO: 7100 - DNA, 15 bp, synthetic construct
  source 1..15: mol_type = other DNA
ggcgtggaagttcag

SEQ ID NO: 7101 - DNA, 15 bp, synthetic construct
  source 1..15: mol_type = other DNA
ctttatctgtttcac

SEQ ID NO: 7102 - DNA, 15 bp, synthetic construct
  source 1..15: mol_type = other DNA
ggtcacgaaccacat

SEQ ID NO: 7103 - DNA, 15 bp, synthetic construct
  source 1..15: mol_type = other DNA
ccctttatgcctctg

SEQ ID NO: 7104 - DNA, 15 bp, synthetic construct
  source 1..15: mol_type = other DNA
cagttcttggtctcg

SEQ ID NO: 7105 - DNA, 15 bp, synthetic construct
  source 1..15: mol_type = other DNA
ggtctaagaggcaca

SEQ ID NO: 7106 - DNA, 15 bp, synthetic construct
  source 1..15: mol_type = other DNA
caggttcgcctttag

SEQ ID NO: 7107 - DNA, 15 bp, synthetic construct
  source 1..15: mol_type = other DNA
tggaatccatcggtc

SEQ ID NO: 7108 - DNA, 15 bp, synthetic construct
  source 1..15: mol_type = other DNA
gggccagtcagacca

SEQ ID NO: 7109 - DNA, 15 bp, synthetic construct
  source 1..15: mol_type = other DNA
tttggtttttggtca

SEQ ID NO: 7110 - DNA, 15 bp, synthetic construct
  source 1..15: mol_type = other DNA
acaaagctgaacatg

SEQ ID NO: 7111 - DNA, 15 bp, synthetic construct
  source 1..15: mol_type = other DNA
tacctgaggccgttc

SEQ ID NO: 7112 - DNA, 15 bp, synthetic construct
  source 1..15: mol_type = other DNA
catgttgcagaagac

SEQ ID NO: 7113 - DNA, 15 bp, synthetic construct
  source 1..15: mol_type = other DNA
agaaagggacttacc

SEQ ID NO: 7114 - DNA, 15 bp, synthetic construct
  source 1..15: mol_type = other DNA
catcgacagtgacgc

SEQ ID NO: 7115 - DNA, 15 bp, synthetic construct
  source 1..15: mol_type = other DNA
ggccaccatcgtgag

SEQ ID NO: 7116 - DNA, 15 bp, synthetic construct
  source 1..15: mol_type = other DNA
tgggtcatttccaca

SEQ ID NO: 7117 - DNA, 15 bp, synthetic construct
  source 1..15: mol_type = other DNA
gggttcagtttgggt

SEQ ID NO: 7118 - DNA, 15 bp, synthetic construct
  source 1..15: mol_type = other DNA
atttctcatcatagc

SEQ ID NO: 7119 - DNA, 15 bp, synthetic construct
  source 1..15: mol_type = other DNA
ttcttgctgatgtac

SEQ ID NO: 7120 - DNA, 15 bp, synthetic construct
  source 1..15: mol_type = other DNA
agaacgaggtagtct

SEQ ID NO: 7121 - DNA, 15 bp, synthetic construct
  source 1..15: mol_type = other DNA
cgcacaacaccttgc

SEQ ID NO: 7122 - DNA, 15 bp, synthetic construct
  source 1..15: mol_type = other DNA
ccagggagaccgttg

SEQ ID NO: 7123 - DNA, 15 bp, synthetic construct
  source 1..15: mol_type = other DNA
cagcacctttaggtc

SEQ ID NO: 7124 - DNA, 15 bp, synthetic construct
  source 1..15: mol_type = other DNA
ttcctcaaatcctta

SEQ ID NO: 7125 - DNA, 15 bp, synthetic construct
  source 1..15: mol_type = other DNA
ccaaatccgatgttt

SEQ ID NO: 7126 - DNA, 15 bp, synthetic construct
  source 1..15: mol_type = other DNA
aaatctgtggtgtta

SEQ ID NO: 7127 - DNA, 15 bp, synthetic construct
  source 1..15: mol_type = other DNA
gcaagcaacatgtat

SEQ ID NO: 7128 - DNA, 15 bp, synthetic construct
  source 1..15: mol_type = other DNA
gggcaaattccagtt

SEQ ID NO: 7129 - DNA, 15 bp, synthetic construct
  source 1..15: mol_type = other DNA
ctctctcctttcgat

SEQ ID NO: 7130 - DNA, 15 bp, synthetic construct
  source 1..15: mol_type = other DNA
taagtttcttttccc

SEQ ID NO: 7131 - DNA, 15 bp, synthetic construct
  source 1..15: mol_type = other DNA
cagatgatttcctca

SEQ ID NO: 7132 - DNA, 15 bp, synthetic construct
  source 1..15: mol_type = other DNA
cttattgaatctcac

SEQ ID NO: 7133 - DNA, 15 bp, synthetic construct
  source 1..15: mol_type = other DNA
agctgttatttcttc

SEQ ID NO: 7134 - DNA, 15 bp, synthetic construct
  source 1..15: mol_type = other DNA
tgcttgcccgtgaaa

SEQ ID NO: 7135 - DNA, 15 bp, synthetic construct
  source 1..15: mol_type = other DNA
tgttactctcctgga

SEQ ID NO: 7136 - DNA, 15 bp, synthetic construct
  source 1..15: mol_type = other DNA
agttattccatgtga

SEQ ID NO: 7137 - DNA, 15 bp, synthetic construct
  source 1..15: mol_type = other DNA
cttatatagtctccc

SEQ ID NO: 7138 - DNA, 15 bp, synthetic construct
  source 1..15: mol_type = other DNA
ttcttcagcttttct

SEQ ID NO: 7139 - DNA, 15 bp, synthetic construct
  source 1..15: mol_type = other DNA
tttcatccaccacag

SEQ ID NO: 7140 - DNA, 15 bp, synthetic construct
  source 1..15: mol_type = other DNA
cccagtgaatatatc

SEQ ID NO: 7141 - DNA, 15 bp, synthetic construct
  source 1..15: mol_type = other DNA
accattttactctgt

SEQ ID NO: 7142 - DNA, 15 bp, synthetic construct
  source 1..15: mol_type = other DNA
ccttcattttgtaga

SEQ ID NO: 7143 - DNA, 15 bp, synthetic construct
  source 1..15: mol_type = other DNA
cagatggtttagatt

SEQ ID NO: 7144 - DNA, 15 bp, synthetic construct
  source 1..15: mol_type = other DNA
tgactgtgattgggt

SEQ ID NO: 7145 - DNA, 15 bp, synthetic construct
  source 1..15: mol_type = other DNA
atttccggcgctgaa

SEQ ID NO: 7146 - DNA, 15 bp, synthetic construct
  source 1..15: mol_type = other DNA
agggtagcaggaaag

SEQ ID NO: 7147 - DNA, 15 bp, synthetic construct
  source 1..15: mol_type = other DNA
ggctgattcccatac

SEQ ID NO: 7148 - DNA, 15 bp, synthetic construct
  source 1..15: mol_type = other DNA
cagctttgataatag

SEQ ID NO: 7149 - DNA, 15 bp, synthetic construct
  source 1..15: mol_type = other DNA
tgcccattcccatca

SEQ ID NO: 7150 - DNA, 15 bp, synthetic construct
  source 1..15: mol_type = other DNA
attgcccacacatcg

SEQ ID NO: 7151 - DNA, 15 bp, synthetic construct
  source 1..15: mol_type = other DNA
ctgcactcgtaggtt

SEQ ID NO: 7152 - DNA, 15 bp, synthetic construct
  source 1..15: mol_type = other DNA
gctcccagaaggttg

SEQ ID NO: 7153 - DNA, 15 bp, synthetic construct
  source 1..15: mol_type = other DNA
tgtagttggagtcat

SEQ ID NO: 7154 - DNA, 15 bp, synthetic construct
  source 1..15: mol_type = other DNA
gaagggtgagctcaa

SEQ ID NO: 7155 - DNA, 15 bp, synthetic construct
  source 1..15: mol_type = other DNA
caggtaggtccagtt

SEQ ID NO: 7156 - DNA, 15 bp, synthetic construct
  source 1..15: mol_type = other DNA
gttggaaatctactt

SEQ ID NO: 7157 - DNA, 15 bp, synthetic construct
  source 1..15: mol_type = other DNA
ctcagagaaggagtc

SEQ ID NO: 7158 - DNA, 15 bp, synthetic construct
  source 1..15: mol_type = other DNA
ggatcgggacactgg

SEQ ID NO: 7159 - DNA, 15 bp, synthetic construct
  source 1..15: mol_type = other DNA
ggaggaagacatcaa

SEQ ID NO: 7160 - DNA, 15 bp, synthetic construct
  source 1..15: mol_type = other DNA
tgaaccgtgtagaca

SEQ ID NO: 7161 - DNA, 15 bp, synthetic construct
  source 1..15: mol_type = other DNA
aggaactcatccggg

SEQ ID NO: 7162 - DNA, 15 bp, synthetic construct
  source 1..15: mol_type = other DNA
cttcgtgctctcacg

SEQ ID NO: 7163 - DNA, 15 bp, synthetic construct
  source 1..15: mol_type = other DNA
accagtttatagaac

SEQ ID NO: 7164 - DNA, 15 bp, synthetic construct
  source 1..15: mol_type = other DNA
atgaaagtcagattg

SEQ ID NO: 7165 - DNA, 15 bp, synthetic construct
  source 1..15: mol_type = other DNA
ctctgaatgaacttg

SEQ ID NO: 7166 - DNA, 15 bp, synthetic construct
  source 1..15: mol_type = other DNA
ctttctgcactttca

SEQ ID NO: 7167 - DNA, 15 bp, synthetic construct
  source 1..15: mol_type = other DNA
tgatgaatgtccata

SEQ ID NO: 7168 - DNA, 15 bp, synthetic construct
  source 1..15: mol_type = other DNA
gagaaggagtagttg

SEQ ID NO: 7169 - DNA, 15 bp, synthetic construct
  source 1..15: mol_type = other DNA
gtcgatgaaagtata

SEQ ID NO: 7170 - DNA, 15 bp, synthetic construct
  source 1..15: mol_type = other DNA
tttggaaggtagcgt

SEQ ID NO: 7171 - DNA, 15 bp, synthetic construct
  source 1..15: mol_type = other DNA
catagcaacagtact

SEQ ID NO: 7172 - DNA, 15 bp, synthetic construct
  source 1..15: mol_type = other DNA
ggccacatgaccatt

SEQ ID NO: 7173 - DNA, 15 bp, synthetic construct
  source 1..15: mol_type = other DNA
cagtagtgcgtcctg

SEQ ID NO: 7174 - DNA, 15 bp, synthetic construct
  source 1..15: mol_type = other DNA
cgcggatgcaagtct

SEQ ID NO: 7175 - DNA, 15 bp, synthetic construct
  source 1..15: mol_type = other DNA
gggaagtgtgctcgc

SEQ ID NO: 7176 - DNA, 15 bp, synthetic construct
  source 1..15: mol_type = other DNA
aaataaacccatccc

SEQ ID NO: 7177 - DNA, 15 bp, synthetic construct
  source 1..15: mol_type = other DNA
tatgcaagccgacgc

SEQ ID NO: 7178 - DNA, 15 bp, synthetic construct
  source 1..15: mol_type = other DNA
gggcatctcatgctc

SEQ ID NO: 7179 - DNA, 15 bp, synthetic construct
  source 1..15: mol_type = other DNA
gacgtagatcttctt

SEQ ID NO: 7180 - DNA, 15 bp, synthetic construct
  source 1..15: mol_type = other DNA
gagaagttggtgaag

SEQ ID NO: 7181 - DNA, 15 bp, synthetic construct
  source 1..15: mol_type = other DNA
ctcagcaccatgtta

SEQ ID NO: 7182 - DNA, 15 bp, synthetic construct
  source 1..15: mol_type = other DNA
cgctgaagttttgcg

SEQ ID NO: 7183 - DNA, 15 bp, synthetic construct
  source 1..15: mol_type = other DNA
gggaagatgatgtgg

SEQ ID NO: 7184 - DNA, 15 bp, synthetic construct
  source 1..15: mol_type = other DNA
gggtccctggatgag

SEQ ID NO: 7185 - DNA, 15 bp, synthetic construct
  source 1..15: mol_type = other DNA
ttcagaaacccatcg

SEQ ID NO: 7186 - DNA, 15 bp, synthetic construct
  source 1..15: mol_type = other DNA
cagctctttgtagag

SEQ ID NO: 7187 - DNA, 15 bp, synthetic construct
  source 1..15: mol_type = other DNA
taggaggttaccctg

SEQ ID NO: 7188 - DNA, 15 bp, synthetic construct
  source 1..15: mol_type = other DNA
atctacggccacgat

SEQ ID NO: 7189 - DNA, 15 bp, synthetic construct
  source 1..15: mol_type = other DNA
tgagactcttgacaa

SEQ ID NO: 7190 - DNA, 15 bp, synthetic construct
  source 1..15: mol_type = other DNA
tcgctcccgtcatgc

SEQ ID NO: 7191 - DNA, 15 bp, synthetic construct
  source 1..15: mol_type = other DNA
ggtagctgaggactc

SEQ ID NO: 7192 - DNA, 15 bp, synthetic construct
  source 1..15: mol_type = other DNA
gatgatgacgctgaa

SEQ ID NO: 7193 - DNA, 15 bp, synthetic construct
  source 1..15: mol_type = other DNA
cctggcgggtagcaa

SEQ ID NO: 7194 - DNA, 15 bp, synthetic construct
  source 1..15: mol_type = other DNA
agtccatcgctgacc

SEQ ID NO: 7195 - DNA, 15 bp, synthetic construct
  source 1..15: mol_type = other DNA
gggagaaatatggtg

SEQ ID NO: 7196 - DNA, 15 bp, synthetic construct
  source 1..15: mol_type = other DNA
accgccgtgggcata

SEQ ID NO: 7197 - DNA, 15 bp, synthetic construct
  source 1..15: mol_type = other DNA
aacaggtcttcattg

SEQ ID NO: 7198 - DNA, 15 bp, synthetic construct
  source 1..15: mol_type = other DNA
gccatggctttatgg

SEQ ID NO: 7199 - DNA, 15 bp, synthetic construct
  source 1..15: mol_type = other DNA
agatgcatactcaca

SEQ ID NO: 7200 - DNA, 15 bp, synthetic construct
  source 1..15: mol_type = other DNA
ctcagtccttggata

SEQ ID NO: 7201 - DNA, 15 bp, synthetic construct
  source 1..15: mol_type = other DNA
tcaattaggactgag

SEQ ID NO: 7202 - DNA, 15 bp, synthetic construct
  source 1..15: mol_type = other DNA
tggctttatgggagc

SEQ ID NO: 7203 - DNA, 15 bp, synthetic construct
  source 1..15: mol_type = other DNA
gttctgtcaagtcaa

SEQ ID NO: 7204 - DNA, 15 bp, synthetic construct
  source 1..15: mol_type = other DNA
ccacgcaatcaagca

SEQ ID NO: 7205 - DNA, 15 bp, synthetic construct
  source 1..15: mol_type = other DNA
gcatcactggctaaa

SEQ ID NO: 7206 - DNA, 15 bp, synthetic construct
  source 1..15: mol_type = other DNA
gtgcccgtgcagatg

SEQ ID NO: 7207 - DNA, 15 bp, synthetic construct
  source 1..15: mol_type = other DNA
ggagcttcctagaag

SEQ ID NO: 7208 - DNA, 15 bp, synthetic construct
  source 1..15: mol_type = other DNA
gagctcagcgatgtg

SEQ ID NO: 7209 - DNA, 15 bp, synthetic construct
  source 1..15: mol_type = other DNA
gttagcaaatgacct

SEQ ID NO: 7210 - DNA, 15 bp, synthetic construct
  source 1..15: mol_type = other DNA
agtagagcaaaacct

SEQ ID NO: 7211 - DNA, 15 bp, synthetic construct
  source 1..15: mol_type = other DNA
gttgcctatgcccag

SEQ ID NO: 7212 - DNA, 15 bp, synthetic construct
  source 1..15: mol_type = other DNA
ggtcctggtagccag

SEQ ID NO: 7213 - DNA, 15 bp, synthetic construct
  source 1..15: mol_type = other DNA
catgtaggttgccgc

SEQ ID NO: 7214 - DNA, 15 bp, synthetic construct
  source 1..15: mol_type = other DNA
cattttgctcaaaga

SEQ ID NO: 7215 - DNA, 15 bp, synthetic construct
  source 1..15: mol_type = other DNA
gatgaagagaagaaa

SEQ ID NO: 7216 - DNA, 15 bp, synthetic construct
  source 1..15: mol_type = other DNA
atgactagggctaag

SEQ ID NO: 7217 - DNA, 15 bp, synthetic construct
  source 1..15: mol_type = other DNA
ggcttccttgcaaac

SEQ ID NO: 7218 - DNA, 15 bp, synthetic construct
  source 1..15: mol_type = other DNA
aaagcacatgtcaac

SEQ ID NO: 7219 - DNA, 15 bp, synthetic construct
  source 1..15: mol_type = other DNA
aggctgaaattgctt

SEQ ID NO: 7220 - DNA, 15 bp, synthetic construct
  source 1..15: mol_type = other DNA
cttgcagatgtagag

SEQ ID NO: 7221 - DNA, 15 bp, synthetic construct
  source 1..15: mol_type = other DNA
aaaccttcatgcacc

SEQ ID NO: 7222 - DNA, 15 bp, synthetic construct
  source 1..15: mol_type = other DNA
cttcttgcttgtggg

SEQ ID NO: 7223 - DNA, 15 bp, synthetic construct
  source 1..15: mol_type = other DNA
ttctacctaaaaccc

SEQ ID NO: 7224 - DNA, 15 bp, synthetic construct
  source 1..15: mol_type = other DNA
ctgagtgtcctagct

SEQ ID NO: 7225 - DNA, 15 bp, synthetic construct
  source 1..15: mol_type = other DNA
cctgaaaaattaggg

SEQ ID NO: 7226 - DNA, 15 bp, synthetic construct
  source 1..15: mol_type = other DNA
atgccgtataatctg

SEQ ID NO: 7227 - DNA, 15 bp, synthetic construct
  source 1..15: mol_type = other DNA
tctttatagaacagg

SEQ ID NO: 7228 - DNA, 15 bp, synthetic construct
  source 1..15: mol_type = other DNA
aaagcccaaagggtt

SEQ ID NO: 7229 - DNA, 15 bp, synthetic construct
  source 1..15: mol_type = other DNA
caatgattcgagtgt

SEQ ID NO: 7230 - DNA, 15 bp, synthetic construct
  source 1..15: mol_type = other DNA
tcactcagtgagata

SEQ ID NO: 7231 - DNA, 15 bp, synthetic construct
  source 1..15: mol_type = other DNA
tcctgcttagggatg

SEQ ID NO: 7232 - DNA, 15 bp, synthetic construct
  source 1..15: mol_type = other DNA
taaggtgggattccc

SEQ ID NO: 7233 - DNA, 15 bp, synthetic construct
  source 1..15: mol_type = other DNA
aaggaaaggcatccc

SEQ ID NO: 7234 - DNA, 15 bp, synthetic construct
  source 1..15: mol_type = other DNA
tggaaagcataatcc

SEQ ID NO: 7235 - DNA, 15 bp, synthetic construct
  source 1..15: mol_type = other DNA
tcctgggcttacggt

SEQ ID NO: 7236 - DNA, 15 bp, synthetic construct
  source 1..15: mol_type = other DNA
gcgctcgagtcaact

SEQ ID NO: 7237 - DNA, 15 bp, synthetic construct
  source 1..15: mol_type = other DNA
caataggatgtcttt

SEQ ID NO: 7238 - DNA, 15 bp, synthetic construct
  source 1..15: mol_type = other DNA
cactgctacagtctg

SEQ ID NO: 7239 - DNA, 15 bp, synthetic construct
  source 1..15: mol_type = other DNA
caacagaaatgggcc

SEQ ID NO: 7240 - DNA, 15 bp, synthetic construct
  source 1..15: mol_type = other DNA
gctgctgaggcaatt

SEQ ID NO: 7241 - DNA, 15 bp, synthetic construct
  source 1..15: mol_type = other DNA
ccaatcgcaaaaaat

SEQ ID NO: 7242 - DNA, 15 bp, synthetic construct
  source 1..15: mol_type = other DNA
cactccacggatgcc

SEQ ID NO: 7243 - DNA, 15 bp, synthetic construct
  source 1..15: mol_type = other DNA
tctgattctgtgctt

SEQ ID NO: 7244 - DNA, 15 bp, synthetic construct
  source 1..15: mol_type = other DNA
ttagtcctggaattt

SEQ ID NO: 7245 - DNA, 15 bp, synthetic construct
  source 1..15: mol_type = other DNA
cacactggctgtagc

SEQ ID NO: 7246 - DNA, 15 bp, synthetic construct
  source 1..15: mol_type = other DNA
cagtggtgatccagg

SEQ ID NO: 7247 - DNA, 15 bp, synthetic construct
  source 1..15: mol_type = other DNA
agtcacctctagtca

SEQ ID NO: 7248 - DNA, 15 bp, synthetic construct
  source 1..15: mol_type = other DNA
ccatgattcacattc

SEQ ID NO: 7249 - DNA, 15 bp, synthetic construct
  source 1..15: mol_type = other DNA
tcttgccatccgaat

SEQ ID NO: 7250 - DNA, 15 bp, synthetic construct
  source 1..15: mol_type = other DNA
gagtgcattcccatt

SEQ ID NO: 7251 - DNA, 15 bp, synthetic construct
  source 1..15: mol_type = other DNA
accaagagcacacaa

SEQ ID NO: 7252 - DNA, 15 bp, synthetic construct
  source 1..15: mol_type = other DNA
tcaggcaatatccga

SEQ ID NO: 7253 - DNA, 15 bp, synthetic construct
  source 1..15: mol_type = other DNA
tacagtaagccatca

SEQ ID NO: 7254 - DNA, 15 bp, synthetic construct
  source 1..15: mol_type = other DNA
catggctttgtaggg

SEQ ID NO: 7255 - DNA, 15 bp, synthetic construct
  source 1..15: mol_type = other DNA
gcactgagagacacc

SEQ ID NO: 7256 - DNA, 15 bp, synthetic construct
  source 1..15: mol_type = other DNA
agggaaagctagcaa

SEQ ID NO: 7257 - DNA, 15 bp, synthetic construct
  source 1..15: mol_type = other DNA
gattcttttcccaga

SEQ ID NO: 7258 - DNA, 15 bp, synthetic construct
  source 1..15: mol_type = other DNA
ttctttcccattaag

SEQ ID NO: 7259 - DNA, 15 bp, synthetic construct
  source 1..15: mol_type = other DNA
cccacagtaagagtc

SEQ ID NO: 7260 - DNA, 15 bp, synthetic construct
  source 1..15: mol_type = other DNA
cagggaactcatcaa

SEQ ID NO: 7261 - DNA, 15 bp, synthetic construct
  source 1..15: mol_type = other DNA
gtgctgtattttgtg

SEQ ID NO: 7262 - DNA, 15 bp, synthetic construct
  source 1..15: mol_type = other DNA
ctctgccataaggaa

SEQ ID NO: 7263 - DNA, 15 bp, synthetic construct
  source 1..15: mol_type = other DNA
tgggcctttattggc

SEQ ID NO: 7264 - DNA, 15 bp, synthetic construct
  source 1..15: mol_type = other DNA
tacacgacacgaggg

SEQ ID NO: 7265 - DNA, 15 bp, synthetic construct
  source 1..15: mol_type = other DNA
ccgtcactaacctct

SEQ ID NO: 7266 - DNA, 15 bp, synthetic construct
  source 1..15: mol_type = other DNA
gaggaagaaagaagg

SEQ ID NO: 7267 - DNA, 15 bp, synthetic construct
  source 1..15: mol_type = other DNA
agccagtgatgtaga

SEQ ID NO: 7268 - DNA, 15 bp, synthetic construct
  source 1..15: mol_type = other DNA
ccttgttatcaatga

SEQ ID NO: 7269 - DNA, 15 bp, synthetic construct
  source 1..15: mol_type = other DNA
cctgtttgtttagat

SEQ ID NO: 7270 - DNA, 15 bp, synthetic construct
  source 1..15: mol_type = other DNA
ttgagtgttgaaaca

SEQ ID NO: 7271 - DNA, 15 bp, synthetic construct
  source 1..15: mol_type = other DNA
cttcatcatatagac

SEQ ID NO: 7272 - DNA, 15 bp, synthetic construct
  source 1..15: mol_type = other DNA
cagagacgtgtgcat

SEQ ID NO: 7273 - DNA, 15 bp, synthetic construct
  source 1..15: mol_type = other DNA
ccagcatcaatgagt

SEQ ID NO: 7274 - DNA, 15 bp, synthetic construct
  source 1..15: mol_type = other DNA
tccatttattcctga

SEQ ID NO: 7275 - DNA, 15 bp, synthetic construct
  source 1..15: mol_type = other DNA
ttgctctcgcattaa

SEQ ID NO: 7276 - DNA, 15 bp, synthetic construct
  source 1..15: mol_type = other DNA
aggtgatgttaagta

SEQ ID NO: 7277 - DNA, 15 bp, synthetic construct
  source 1..15: mol_type = other DNA
tgtgagagatggttc

SEQ ID NO: 7278 - DNA, 15 bp, synthetic construct
  source 1..15: mol_type = other DNA
acttaatagaaccgt

SEQ ID NO: 7279 - DNA, 15 bp, synthetic construct
  source 1..15: mol_type = other DNA
ggcagaccaattgca

SEQ ID NO: 7280 - DNA, 15 bp, synthetic construct
  source 1..15: mol_type = other DNA
accaaatttcctctc

SEQ ID NO: 7281 - DNA, 15 bp, synthetic construct
  source 1..15: mol_type = other DNA
atttccagtataacc

SEQ ID NO: 7282 - DNA, 15 bp, synthetic construct
  source 1..15: mol_type = other DNA
acctgaagaaactcg

SEQ ID NO: 7283 - DNA, 15 bp, synthetic construct
  source 1..15: mol_type = other DNA
agctcaagttctcca

SEQ ID NO: 7284 - DNA, 15 bp, synthetic construct
  source 1..15: mol_type = other DNA
tgtgagtgtgcacac

SEQ ID NO: 7285 - DNA, 15 bp, synthetic construct
  source 1..15: mol_type = other DNA
gcagctcaagggtgt

SEQ ID NO: 7286 - DNA, 15 bp, synthetic construct
  source 1..15: mol_type = other DNA
acctacaggttcttt

SEQ ID NO: 7287 - DNA, 15 bp, synthetic construct
  source 1..15: mol_type = other DNA
aaagtgcagtttgga

SEQ ID NO: 7288 - DNA, 15 bp, synthetic construct
  source 1..15: mol_type = other DNA
ggttccaccattctg

SEQ ID NO: 7289 - DNA, 15 bp, synthetic construct
  source 1..15: mol_type = other DNA
agccacagaacagcc

SEQ ID NO: 7290 - DNA, 15 bp, synthetic construct
  source 1..15: mol_type = other DNA
ctgctgcaagccttg

SEQ ID NO: 7291 - DNA, 15 bp, synthetic construct
  source 1..15: mol_type = other DNA
cctcagcactgaact

SEQ ID NO: 7292 - DNA, 15 bp, synthetic construct
  source 1..15: mol_type = other DNA
gatgtctcagagtcg

SEQ ID NO: 7293 - DNA, 15 bp, synthetic construct
  source 1..15: mol_type = other DNA
aggagaagtttgtga

SEQ ID NO: 7294 - DNA, 15 bp, synthetic construct
  source 1..15: mol_type = other DNA
tgcacgtgatgttgc

SEQ ID NO: 7295 - DNA, 15 bp, synthetic construct
  source 1..15: mol_type = other DNA
cagagggttttgcaa

SEQ ID NO: 7296 - DNA, 15 bp, synthetic construct
  source 1..15: mol_type = other DNA
ccaccagaacacgaa

SEQ ID NO: 7297 - DNA, 15 bp, synthetic construct
  source 1..15: mol_type = other DNA
gagtatgttggtggc

SEQ ID NO: 7298 - DNA, 15 bp, synthetic construct
  source 1..15: mol_type = other DNA
atgatgcctggttct

SEQ ID NO: 7299 - DNA, 15 bp, synthetic construct
  source 1..15: mol_type = other DNA
ttcgtcacaccgtgg

SEQ ID NO: 7300 - DNA, 15 bp, synthetic construct
  source 1..15: mol_type = other DNA
gcaagctgatcttat

SEQ ID NO: 7301 - DNA, 15 bp, synthetic construct
  source 1..15: mol_type = other DNA
aggaagagcttgagt

SEQ ID NO: 7302 - DNA, 15 bp, synthetic construct
  source 1..15: mol_type = other DNA
cttctttgggaagcc

SEQ ID NO: 7303 - DNA, 15 bp, synthetic construct
  source 1..15: mol_type = other DNA
gggtctgctgaatag

SEQ ID NO: 7304 - DNA, 15 bp, synthetic construct
  source 1..15: mol_type = other DNA
ctgggatggcgtcaa

SEQ ID NO: 7305 - DNA, 15 bp, synthetic construct
  source 1..15: mol_type = other DNA
gcagagaacagtgtt

SEQ ID NO: 7306 - DNA, 15 bp, synthetic construct
  source 1..15: mol_type = other DNA
gcagcacagcgtctt

SEQ ID NO: 7307 - DNA, 15 bp, synthetic construct
  source 1..15: mol_type = other DNA
cgggacaggacaaat

SEQ ID NO: 7308 - DNA, 15 bp, synthetic construct
  source 1..15: mol_type = other DNA
gttgctgaaaggtac

SEQ ID NO: 7309 - DNA, 15 bp, synthetic construct
  source 1..15: mol_type = other DNA
aacatacaccacttt

SEQ ID NO: 7310 - DNA, 15 bp, synthetic construct
  source 1..15: mol_type = other DNA
gccaaaactgatccc

SEQ ID NO: 7311 - DNA, 15 bp, synthetic construct
  source 1..15: mol_type = other DNA
ggcagtagctgagtg

SEQ ID NO: 7312 - DNA, 15 bp, synthetic construct
  source 1..15: mol_type = other DNA
ctgccaggaagattg

SEQ ID NO: 7313 - DNA, 15 bp, synthetic construct
  source 1..15: mol_type = other DNA
gctgtctgaatcaaa

SEQ ID NO: 7314 - DNA, 15 bp, synthetic construct
  source 1..15: mol_type = other DNA
gcacctgggtagaac

SEQ ID NO: 7315 - DNA, 15 bp, synthetic construct
  source 1..15: mol_type = other DNA
agggctttaaagagc

SEQ ID NO: 7316 - DNA, 15 bp, synthetic construct
  source 1..15: mol_type = other DNA
ctgcccaatggatag

SEQ ID NO: 7317 - DNA, 15 bp, synthetic construct
  source 1..15: mol_type = other DNA
gtaaccaggatataa

SEQ ID NO: 7318 - DNA, 15 bp, synthetic construct
  source 1..15: mol_type = other DNA
ggtttaagtccacgg

SEQ ID NO: 7319 - DNA, 15 bp, synthetic construct
  source 1..15: mol_type = other DNA
aggaacacagtccca

SEQ ID NO: 7320 - DNA, 15 bp, synthetic construct
  source 1..15: mol_type = other DNA
tctgacttcaatgaa

SEQ ID NO: 7321 - DNA, 15 bp, synthetic construct
  source 1..15: mol_type = other DNA
agccgatgaagaaga

SEQ ID NO: 7322 - DNA, 15 bp, synthetic construct
  source 1..15: mol_type = other DNA
ccaagtctgccaact

SEQ ID NO: 7323 - DNA, 15 bp, synthetic construct
  source 1..15: mol_type = other DNA
tagaaagcgagcact

SEQ ID NO: 7324 - DNA, 15 bp, synthetic construct
  source 1..15: mol_type = other DNA
gccatcgtaagaacc

SEQ ID NO: 7325 - DNA, 15 bp, synthetic construct
  source 1..15: mol_type = other DNA
ccaggtacctatcaa

SEQ ID NO: 7326 - DNA, 15 bp, synthetic construct
  source 1..15: mol_type = other DNA
gtcagcaaagcacag

SEQ ID NO: 7327 - DNA, 15 bp, synthetic construct
  source 1..15: mol_type = other DNA
ggctaaatgcaaccg

SEQ ID NO: 7328 - DNA, 15 bp, synthetic construct
  source 1..15: mol_type = other DNA
caaaagggttgagac

SEQ ID NO: 7329 - DNA, 15 bp, synthetic construct
  source 1..15: mol_type = other DNA
gagattggactggaa

SEQ ID NO: 7330 - DNA, 15 bp, synthetic construct
  source 1..15: mol_type = other DNA
tctttgttcttggtc

SEQ ID NO: 7331 - DNA, 15 bp, synthetic construct
  source 1..15: mol_type = other DNA
ggaaggctatcactc

SEQ ID NO: 7332 - DNA, 15 bp, synthetic construct
  source 1..15: mol_type = other DNA
ctgtagacacaaggc

SEQ ID NO: 7333 - DNA, 15 bp, synthetic construct
  source 1..15: mol_type = other DNA
ggaggtaaatgtcgg

SEQ ID NO: 7334 - DNA, 15 bp, synthetic construct
  source 1..15: mol_type = other DNA
atggtggaagaagtc

SEQ ID NO: 7335 - DNA, 15 bp, synthetic construct
  source 1..15: mol_type = other DNA
acatgtgagagtgtg

SEQ ID NO: 7336 - DNA, 15 bp, synthetic construct
  source 1..15: mol_type = other DNA
gatgaggagaaatca

SEQ ID NO: 7337 - DNA, 15 bp, synthetic construct
  source 1..15: mol_type = other DNA
cccatacaggtggta

SEQ ID NO: 7338 - DNA, 15 bp, synthetic construct
  source 1..15: mol_type = other DNA
cccatggtggacgta

SEQ ID NO: 7339 - DNA, 15 bp, synthetic construct
  source 1..15: mol_type = other DNA
tgatctctatgtgaa

SEQ ID NO: 7340 - DNA, 15 bp, synthetic construct
  source 1..15: mol_type = other DNA
acaacactctagggt

SEQ ID NO: 7341 - DNA, 15 bp, synthetic construct
  source 1..15: mol_type = other DNA
atggtaagggtgatg

SEQ ID NO: 7342 - DNA, 15 bp, synthetic construct
  source 1..15: mol_type = other DNA
tgattcatggtgctg

SEQ ID NO: 7343 - DNA, 15 bp, synthetic construct
  source 1..15: mol_type = other DNA
tctcaacacgtggac

SEQ ID NO: 7344 - DNA, 15 bp, synthetic construct
  source 1..15: mol_type = other DNA
tgtggtccatccttg

SEQ ID NO: 7345 - DNA, 15 bp, synthetic construct
  source 1..15: mol_type = other DNA
atgccacttagagtc

SEQ ID NO: 7346 - DNA, 15 bp, synthetic construct
  source 1..15: mol_type = other DNA
aagcagaaagattcc

SEQ ID NO: 7347 - DNA, 15 bp, synthetic construct
  source 1..15: mol_type = other DNA
gctttcagtaaattc

SEQ ID NO: 7348 - DNA, 15 bp, synthetic construct
  source 1..15: mol_type = other DNA
atgtgtttggaattg

SEQ ID NO: 7349 - DNA, 15 bp, synthetic construct
  source 1..15: mol_type = other DNA
ttactaatgctgatg

SEQ ID NO: 7350 - DNA, 15 bp, synthetic construct
  source 1..15: mol_type = other DNA
gatgggaaaggtgag

SEQ ID NO: 7351 - DNA, 15 bp, synthetic construct
  source 1..15: mol_type = other DNA
cactaagaacatagc

SEQ ID NO: 7352 - DNA, 15 bp, synthetic construct
  source 1..15: mol_type = other DNA
catatactccatgta

SEQ ID NO: 7353 - DNA, 15 bp, synthetic construct
  source 1..15: mol_type = other DNA
gagtagtagcagctg

SEQ ID NO: 7354 - DNA, 15 bp, synthetic construct
  source 1..15: mol_type = other DNA
ccagggtagagttat

SEQ ID NO: 7355 - DNA, 15 bp, synthetic construct
  source 1..15: mol_type = other DNA
ggctttctcaatatc

SEQ ID NO: 7356 - DNA, 15 bp, synthetic construct
  source 1..15: mol_type = other DNA
ctcctttgggcagtg

SEQ ID NO: 7357 - DNA, 15 bp, synthetic construct
  source 1..15: mol_type = other DNA
tggctctatactctc

SEQ ID NO: 7358 - DNA, 15 bp, synthetic construct
  source 1..15: mol_type = other DNA
ggctatagccatgcc

SEQ ID NO: 7359 - DNA, 15 bp, synthetic construct
  source 1..15: mol_type = other DNA
ctgatttctgctggc

SEQ ID NO: 7360 - DNA, 15 bp, synthetic construct
  source 1..15: mol_type = other DNA
ctgtttttggtcctt

SEQ ID NO: 7361 - DNA, 15 bp, synthetic construct
  source 1..15: mol_type = other DNA
gcaaagacagcgtcc

SEQ ID NO: 7362 - DNA, 15 bp, synthetic construct
  source 1..15: mol_type = other DNA
gcatcaaatctagaa

SEQ ID NO: 7363 - DNA, 15 bp, synthetic construct
  source 1..15: mol_type = other DNA
tctagcatgaaaatg

SEQ ID NO: 7364 - DNA, 15 bp, synthetic construct
  source 1..15: mol_type = other DNA
agccttgcttgcttc

SEQ ID NO: 7365 - DNA, 15 bp, synthetic construct
  source 1..15: mol_type = other DNA
actccagtaataatg

SEQ ID NO: 7366 - DNA, 15 bp, synthetic construct
  source 1..15: mol_type = other DNA
atgaaatatgtgcac

SEQ ID NO: 7367 - DNA, 15 bp, synthetic construct
  source 1..15: mol_type = other DNA
tggtaaccagccttt

SEQ ID NO: 7368 - DNA, 15 bp, synthetic construct
  source 1..15: mol_type = other DNA
tccgtgtgttccaaa

SEQ ID NO: 7369 - DNA, 15 bp, synthetic construct
  source 1..15: mol_type = other DNA
tctaggtttttcaga

SEQ ID NO: 7370 - DNA, 15 bp, synthetic construct
  source 1..15: mol_type = other DNA
tcagacgtgtcttca

SEQ ID NO: 7371 - DNA, 15 bp, synthetic construct
  source 1..15: mol_type = other DNA
ttctttcacagcatc

SEQ ID NO: 7372 - DNA, 15 bp, synthetic construct
  source 1..15: mol_type = other DNA
ccaaatgatgcataa

SEQ ID NO: 7373 - DNA, 15 bp, synthetic construct
  source 1..15: mol_type = other DNA
gaattttgagatgct

SEQ ID NO: 7374 - DNA, 15 bp, synthetic construct
  source 1..15: mol_type = other DNA
cttcagaatgagtca

SEQ ID NO: 7375 - DNA, 15 bp, synthetic construct
  source 1..15: mol_type = other DNA
ttaaagcacgctgcg

SEQ ID NO: 7376 - DNA, 15 bp, synthetic construct
  source 1..15: mol_type = other DNA
atggagacagtcgtg

SEQ ID NO: 7377 - DNA, 15 bp, synthetic construct
  source 1..15: mol_type = other DNA
cagcacgaccacgac

SEQ ID NO: 7378 - DNA, 15 bp, synthetic construct
  source 1..15: mol_type = other DNA
tacagctctatcgac

SEQ ID NO: 7379 - DNA, 15 bp, synthetic construct
  source 1..15: mol_type = other DNA
ctgctccaagcggaa

SEQ ID NO: 7380 - DNA, 15 bp, synthetic construct
  source 1..15: mol_type = other DNA
ggcaaagtgtgcaaa

SEQ ID NO: 7381 - DNA, 15 bp, synthetic construct
  source 1..15: mol_type = other DNA
gctttcgaagaatcg

SEQ ID NO: 7382 - DNA, 15 bp, synthetic construct
  source 1..15: mol_type = other DNA
ctaagctgctacgtg

SEQ ID NO: 7383 - DNA, 15 bp, synthetic construct
  source 1..15: mol_type = other DNA
tgaagaaaggacact

SEQ ID NO: 7384 - DNA, 15 bp, synthetic construct
  source 1..15: mol_type = other DNA
cacaagtgcttgcct

SEQ ID NO: 7385 - DNA, 15 bp, synthetic construct
  source 1..15: mol_type = other DNA
cagcacaaacacgtg

SEQ ID NO: 7386 - DNA, 15 bp, synthetic construct
  source 1..15: mol_type = other DNA
acaaataccaccagg

SEQ ID NO: 7387 - DNA, 15 bp, synthetic construct
  source 1..15: mol_type = other DNA
gggcaatgcggctga

SEQ ID NO: 7388 - DNA, 15 bp, synthetic construct
  source 1..15: mol_type = other DNA
cacagatgtgcacag

SEQ ID NO: 7389 - DNA, 15 bp, synthetic construct
  source 1..15: mol_type = other DNA
tcgagcaaatttaca

SEQ ID NO: 7390 - DNA, 15 bp, synthetic construct
  source 1..15: mol_type = other DNA
cccacggtgataaca

SEQ ID NO: 7391 - DNA, 15 bp, synthetic construct
  source 1..15: mol_type = other DNA
tcacaaaacccagtc

SEQ ID NO: 7392 - DNA, 15 bp, synthetic construct
  source 1..15: mol_type = other DNA
cctgaatccacttta

SEQ ID NO: 7393 - DNA, 15 bp, synthetic construct
  source 1..15: mol_type = other DNA
agttttcctcgagtg

SEQ ID NO: 7394 - DNA, 15 bp, synthetic construct
  source 1..15: mol_type = other DNA
ggcaggttgacttac

SEQ ID NO: 7395 - DNA, 15 bp, synthetic construct
  source 1..15: mol_type = other DNA
ctcgtggacgcactt

SEQ ID NO: 7396 - DNA, 15 bp, synthetic construct
  source 1..15: mol_type = other DNA
ccacgtctttgccct

SEQ ID NO: 7397 - DNA, 15 bp, synthetic construct
  source 1..15: mol_type = other DNA
cgtctagggataaag

SEQ ID NO: 7398 - DNA, 15 bp, synthetic construct
  source 1..15: mol_type = other DNA
tttcttttcttggac

SEQ ID NO: 7399 - DNA, 15 bp, synthetic construct
  source 1..15: mol_type = other DNA
gtgtgaaaggataca

SEQ ID NO: 7400 - DNA, 15 bp, synthetic construct
  source 1..15: mol_type = other DNA
agtaggacttaattc

SEQ ID NO: 7401 - DNA, 15 bp, synthetic construct
  source 1..15: mol_type = other DNA
aagcagagatgtcga

SEQ ID NO: 7402 - DNA, 15 bp, synthetic construct
  source 1..15: mol_type = other DNA
ggaggtagagttcag

SEQ ID NO: 7403 - DNA, 15 bp, synthetic construct
  source 1..15: mol_type = other DNA
ggtccacacacacaa

SEQ ID NO: 7404 - DNA, 15 bp, synthetic construct
  source 1..15: mol_type = other DNA
actacatggattcct

SEQ ID NO: 7405 - DNA, 15 bp, synthetic construct
  source 1..15: mol_type = other DNA
gctttccctgagtat

SEQ ID NO: 7406 - DNA, 15 bp, synthetic construct
  source 1..15: mol_type = other DNA
agagcagggataagg

SEQ ID NO: 7407 - DNA, 15 bp, synthetic construct
  source 1..15: mol_type = other DNA
tctacacctcaagct

SEQ ID NO: 7408 - DNA, 15 bp, synthetic construct
  source 1..15: mol_type = other DNA
agctttttgagtctt

SEQ ID NO: 7409 - DNA, 15 bp, synthetic construct
  source 1..15: mol_type = other DNA
ccttcacatctgctg

SEQ ID NO: 7410 - DNA, 15 bp, synthetic construct
  source 1..15: mol_type = other DNA
gttaaccattgagtg

SEQ ID NO: 7411 - DNA, 15 bp, synthetic construct
  source 1..15: mol_type = other DNA
acatggcttccaaag

SEQ ID NO: 7412 - DNA, 15 bp, synthetic construct
  source 1..15: mol_type = other DNA
tacctgtgagatgca

SEQ ID NO: 7413 - DNA, 15 bp, synthetic construct
  source 1..15: mol_type = other DNA
ggttgggtgaacatc

SEQ ID NO: 7414 - DNA, 15 bp, synthetic construct
  source 1..15: mol_type = other DNA
tgggtggtagaagaa

SEQ ID NO: 7415 - DNA, 15 bp, synthetic construct
  source 1..15: mol_type = other DNA
acctagttccacagt

SEQ ID NO: 7416 - DNA, 15 bp, synthetic construct
  source 1..15: mol_type = other DNA
ttgtatggttgggaa

SEQ ID NO: 7417 - DNA, 15 bp, synthetic construct
  source 1..15: mol_type = other DNA
actccaatcagaacc

SEQ ID NO: 7418 - DNA, 15 bp, synthetic construct
  source 1..15: mol_type = other DNA
gggaagttacatgaa

SEQ ID NO: 7419 - DNA, 15 bp, synthetic construct
  source 1..15: mol_type = other DNA
cttgaactaagctgg

SEQ ID NO: 7420 - DNA, 15 bp, synthetic construct
  source 1..15: mol_type = other DNA
ttcgggtgggatctc

SEQ ID NO: 7421 - DNA, 15 bp, synthetic construct
  source 1..15: mol_type = other DNA
ctcagataaatcaga

SEQ ID NO: 7422 - DNA, 15 bp, synthetic construct
  source 1..15: mol_type = other DNA
cagcatgctaacagg

SEQ ID NO: 7423 - DNA, 15 bp, synthetic construct
  source 1..15: mol_type = other DNA
ttgagaaagcccttt

SEQ ID NO: 7424 - DNA, 15 bp, synthetic construct
  source 1..15: mol_type = other DNA
tccagaatatccgca

SEQ ID NO: 7425 - DNA, 15 bp, synthetic construct
  source 1..15: mol_type = other DNA
cactcctgtattgga

SEQ ID NO: 7426 - DNA, 15 bp, synthetic construct
  source 1..15: mol_type = other DNA
ctttcaaggattgta

SEQ ID NO: 7427 - DNA, 15 bp, synthetic construct
  source 1..15: mol_type = other DNA
ctatcttgttagatc

SEQ ID NO: 7428 - DNA, 15 bp, synthetic construct
  source 1..15: mol_type = other DNA
atcatgcttccacta

SEQ ID NO: 7429 - DNA, 15 bp, synthetic construct
  source 1..15: mol_type = other DNA
agcgcttagtacttc

SEQ ID NO: 7430 - DNA, 15 bp, synthetic construct
  source 1..15: mol_type = other DNA
caggaacagcgaccc

SEQ ID NO: 7431 - DNA, 15 bp, synthetic construct
  source 1..15: mol_type = other DNA
gccatcctcctttgg

SEQ ID NO: 7432 - DNA, 15 bp, synthetic construct
  source 1..15: mol_type = other DNA
agagaagaaaggcac

SEQ ID NO: 7433 - DNA, 15 bp, synthetic construct
  source 1..15: mol_type = other DNA
gtctaccctgctttc

SEQ ID NO: 7434 - DNA, 15 bp, synthetic construct
  source 1..15: mol_type = other DNA
ggaggtacagcacga

SEQ ID NO: 7435 - DNA, 15 bp, synthetic construct
  source 1..15: mol_type = other DNA
gaagatgaagtctgg

SEQ ID NO: 7436 - DNA, 15 bp, synthetic construct
  source 1..15: mol_type = other DNA
caacctcggcgtcat

SEQ ID NO: 7437 - DNA, 15 bp, synthetic construct
  source 1..15: mol_type = other DNA
gatgttgaagagggc

SEQ ID NO: 7438 - DNA, 15 bp, synthetic construct
  source 1..15: mol_type = other DNA
tgatttagtctgtga

SEQ ID NO: 7439 - DNA, 15 bp, synthetic construct
  source 1..15: mol_type = other DNA
tcccggaacttgacc

SEQ ID NO: 7440 - DNA, 15 bp, synthetic construct
  source 1..15: mol_type = other DNA
ctcgcattcttctgc

SEQ ID NO: 7441 - DNA, 15 bp, synthetic construct
  source 1..15: mol_type = other DNA
gctgggtggcatgaa

SEQ ID NO: 7442 - DNA, 15 bp, synthetic construct
  source 1..15: mol_type = other DNA
gtcgaagttcaggct

SEQ ID NO: 7443 - DNA, 15 bp, synthetic construct
  source 1..15: mol_type = other DNA
agtcataggaagagc

SEQ ID NO: 7444 - DNA, 15 bp, synthetic construct
  source 1..15: mol_type = other DNA
aggatgaatcccggc

SEQ ID NO: 7445 - DNA, 15 bp, synthetic construct
  source 1..15: mol_type = other DNA
ctgtgtaaaggcctg

SEQ ID NO: 7446 - DNA, 15 bp, synthetic construct
  source 1..15: mol_type = other DNA
gaagttttagtttcc

SEQ ID NO: 7447 - DNA, 15 bp, synthetic construct
  source 1..15: mol_type = other DNA
agtcgatgctgatcc

SEQ ID NO: 7448 - DNA, 15 bp, synthetic construct
  source 1..15: mol_type = other DNA
ggccgcacagagttt

SEQ ID NO: 7449 - DNA, 15 bp, synthetic construct
  source 1..15: mol_type = other DNA
tcgactcacagagaa

SEQ ID NO: 7450 - DNA, 15 bp, synthetic construct
  source 1..15: mol_type = other DNA
ggctttggttataag

SEQ ID NO: 7451 - DNA, 15 bp, synthetic construct
  source 1..15: mol_type = other DNA
tgttcttacgtttgc

SEQ ID NO: 7452 - DNA, 15 bp, synthetic construct
  source 1..15: mol_type = other DNA
gcgggaaggttttcc

SEQ ID NO: 7453 - DNA, 15 bp, synthetic construct
  source 1..15: mol_type = other DNA
atgatgtgctgaaac

SEQ ID NO: 7454 - DNA, 15 bp, synthetic construct
  source 1..15: mol_type = other DNA
ttacgtgattcacta

SEQ ID NO: 7455 - DNA, 15 bp, synthetic construct
  source 1..15: mol_type = other DNA
gccactggaacgctc

SEQ ID NO: 7456 - DNA, 15 bp, synthetic construct
  source 1..15: mol_type = other DNA
tcccttttctacagt

SEQ ID NO: 7457 - DNA, 15 bp, synthetic construct
  source 1..15: mol_type = other DNA
cctcgctttcctttg

SEQ ID NO: 7458 - DNA, 15 bp, synthetic construct
  source 1..15: mol_type = other DNA
ttcagacaacagtgg

SEQ ID NO: 7459 - DNA, 15 bp, synthetic construct
  source 1..15: mol_type = other DNA
agggatccagacgcc

SEQ ID NO: 7460 - DNA, 15 bp, synthetic construct
  source 1..15: mol_type = other DNA
gcaatagcaggacag

SEQ ID NO: 7461 - DNA, 15 bp, synthetic construct
  source 1..15: mol_type = other DNA
cttaatacaagactg

SEQ ID NO: 7462 - DNA, 15 bp, synthetic construct
  source 1..15: mol_type = other DNA
gaccaatccattgcc

SEQ ID NO: 7463 - DNA, 15 bp, synthetic construct
  source 1..15: mol_type = other DNA
agcccatttcctcgg

SEQ ID NO: 7464 - DNA, 15 bp, synthetic construct
  source 1..15: mol_type = other DNA
ccaccactcgatccc

SEQ ID NO: 7465 - DNA, 15 bp, synthetic construct
  source 1..15: mol_type = other DNA
tccatggtaaccgct

SEQ ID NO: 7466 - DNA, 15 bp, synthetic construct
  source 1..15: mol_type = other DNA
tatctgtcatctgcc

SEQ ID NO: 7467 - DNA, 15 bp, synthetic construct
  source 1..15: mol_type = other DNA
gatggaaatccactt

SEQ ID NO: 7468 - DNA, 15 bp, synthetic construct
  source 1..15: mol_type = other DNA
aaacgttccacggga

SEQ ID NO: 7469 - DNA, 15 bp, synthetic construct
  source 1..15: mol_type = other DNA
ctgtacttgtccgtc

SEQ ID NO: 7470 - DNA, 15 bp, synthetic construct
  source 1..15: mol_type = other DNA
ataggaagttcccaa

SEQ ID NO: 7471 - DNA, 15 bp, synthetic construct
  source 1..15: mol_type = other DNA
tccatttccagcgtt

SEQ ID NO: 7472 - DNA, 15 bp, synthetic construct
  source 1..15: mol_type = other DNA
ggttcctctagctac

SEQ ID NO: 7473 - DNA, 15 bp, synthetic construct
  source 1..15: mol_type = other DNA
tggcagaatgtctgt

SEQ ID NO: 7474 - DNA, 15 bp, synthetic construct
  source 1..15: mol_type = other DNA
cgccacatggtagag

SEQ ID NO: 7475 - DNA, 15 bp, synthetic construct
  source 1..15: mol_type = other DNA
tgagtcaccagactg

SEQ ID NO: 7476 - DNA, 15 bp, synthetic construct
  source 1..15: mol_type = other DNA
ggtaagatgacgtaa

SEQ ID NO: 7477 - DNA, 15 bp, synthetic construct
  source 1..15: mol_type = other DNA
tgagtttcctcgggt

SEQ ID NO: 7478 - DNA, 15 bp, synthetic construct
  source 1..15: mol_type = other DNA
gctctccgttggcaa

SEQ ID NO: 7479 - DNA, 15 bp, synthetic construct
  source 1..15: mol_type = other DNA
tgagcttcctgcttg

SEQ ID NO: 7480 - DNA, 15 bp, synthetic construct
  source 1..15: mol_type = other DNA
gcggaacttcacgcc

SEQ ID NO: 7481 - DNA, 15 bp, synthetic construct
  source 1..15: mol_type = other DNA
ctgcagtagaagttg

SEQ ID NO: 7482 - DNA, 15 bp, synthetic construct
  source 1..15: mol_type = other DNA
ccattctagacaggg

SEQ ID NO: 7483 - DNA, 15 bp, synthetic construct
  source 1..15: mol_type = other DNA
cctttggtcagagct

SEQ ID NO: 7484 - DNA, 15 bp, synthetic construct
  source 1..15: mol_type = other DNA
agaacagttcatctg

SEQ ID NO: 7485 - DNA, 15 bp, synthetic construct
  source 1..15: mol_type = other DNA
cctggctttccactt

SEQ ID NO: 7486 - DNA, 15 bp, synthetic construct
  source 1..15: mol_type = other DNA
cctctgtcgggtttc

SEQ ID NO: 7487 - DNA, 15 bp, synthetic construct
  source 1..15: mol_type = other DNA
ggacgtcttagggct

SEQ ID NO: 7488 - DNA, 15 bp, synthetic construct
  source 1..15: mol_type = other DNA
caccagggaggtgtc

SEQ ID NO: 7489 - DNA, 15 bp, synthetic construct
  source 1..15: mol_type = other DNA
ccatcgattacccag

SEQ ID NO: 7490 - DNA, 15 bp, synthetic construct
  source 1..15: mol_type = other DNA
gaacgtggtgagaga

SEQ ID NO: 7491 - DNA, 15 bp, synthetic construct
  source 1..15: mol_type = other DNA
tgagtgattcaggga

SEQ ID NO: 7492 - DNA, 15 bp, synthetic construct
  source 1..15: mol_type = other DNA
gtttcttacacttcc

SEQ ID NO: 7493 - DNA, 15 bp, synthetic construct
  source 1..15: mol_type = other DNA
cttgaagtcttttgt

SEQ ID NO: 7494 - DNA, 15 bp, synthetic construct
  source 1..15: mol_type = other DNA
ggtccctaagggata

SEQ ID NO: 7495 - DNA, 15 bp, synthetic construct
  source 1..15: mol_type = other DNA
cagagatgagcttgc

SEQ ID NO: 7496 - DNA, 15 bp, synthetic construct
  source 1..15: mol_type = other DNA
tgatccacagaaaag

SEQ ID NO: 7497 - DNA, 15 bp, synthetic construct
  source 1..15: mol_type = other DNA
gagaatgcgcaagct

SEQ ID NO: 7498 - DNA, 15 bp, synthetic construct
  source 1..15: mol_type = other DNA
gcaaatagtcatctt

SEQ ID NO: 7499 - DNA, 15 bp, synthetic construct
  source 1..15: mol_type = other DNA
acagtggaaattgcc

SEQ ID NO: 7500 - DNA, 15 bp, synthetic construct
  source 1..15: mol_type = other DNA
cactatggctgagag

SEQ ID NO: 7501 - DNA, 15 bp, synthetic construct
  source 1..15: mol_type = other DNA
tctgcccttgctaca

SEQ ID NO: 7502 - DNA, 15 bp, synthetic construct
  source 1..15: mol_type = other DNA
aaggagaacctgaga

SEQ ID NO: 7503 - DNA, 15 bp, synthetic construct
  source 1..15: mol_type = other DNA
ggtgtctgttctgat

SEQ ID NO: 7504 - DNA, 15 bp, synthetic construct
  source 1..15: mol_type = other DNA
accttgctgaactgc

SEQ ID NO: 7505 - DNA, 15 bp, synthetic construct
  source 1..15: mol_type = other DNA
acgtgtagaagttaa

SEQ ID NO: 7506 - DNA, 15 bp, synthetic construct
  source 1..15: mol_type = other DNA
aaggctactaatggg

SEQ ID NO: 7507 - DNA, 15 bp, synthetic construct
  source 1..15: mol_type = other DNA
tcagggatgagacat

SEQ ID NO: 7508 - DNA, 15 bp, synthetic construct
  source 1..15: mol_type = other DNA
agaacagtacatgtt

SEQ ID NO: 7509 - DNA, 15 bp, synthetic construct
  source 1..15: mol_type = other DNA
aacacccattcatgg

SEQ ID NO: 7510 - DNA, 15 bp, synthetic construct
  source 1..15: mol_type = other DNA
cctcagaagatttcc

SEQ ID NO: 7511 - DNA, 15 bp, synthetic construct
  source 1..15: mol_type = other DNA
ggcaaggcctataac

SEQ ID NO: 7512 - DNA, 15 bp, synthetic construct
  source 1..15: mol_type = other DNA
tagtcttcatggtaa

SEQ ID NO: 7513 - DNA, 15 bp, synthetic construct
  source 1..15: mol_type = other DNA
acacagtttatggca

SEQ ID NO: 7514 - DNA, 15 bp, synthetic construct
  source 1..15: mol_type = other DNA
ggcattctttgtctt

SEQ ID NO: 7515 - DNA, 15 bp, synthetic construct
  source 1..15: mol_type = other DNA
actctccattagcct

SEQ ID NO: 7516 - DNA, 15 bp, synthetic construct
  source 1..15: mol_type = other DNA
cctgaccagacaagt

SEQ ID NO: 7517 - DNA, 15 bp, synthetic construct
  source 1..15: mol_type = other DNA
tctttcgaaacttca

SEQ ID NO: 7518 - DNA, 15 bp, synthetic construct
  source 1..15: mol_type = other DNA
acagtgctgtttgga

SEQ ID NO: 7519 - DNA, 15 bp, synthetic construct
  source 1..15: mol_type = other DNA
acgatgttaatgatc

SEQ ID NO: 7520 - DNA, 15 bp, synthetic construct
  source 1..15: mol_type = other DNA
acccatagggtcaga

SEQ ID NO: 7521 - DNA, 15 bp, synthetic construct
  source 1..15: mol_type = other DNA
gactaggctaagcag

SEQ ID NO: 7522 - DNA, 15 bp, synthetic construct
  source 1..15: mol_type = other DNA
taggaactcagatgg

SEQ ID NO: 7523 - DNA, 15 bp, synthetic construct
  source 1..15: mol_type = other DNA
gggaaggttccaagg

SEQ ID NO: 7524 - DNA, 15 bp, synthetic construct
  source 1..15: mol_type = other DNA
gctcttatgcaagca

SEQ ID NO: 7525 - DNA, 15 bp, synthetic construct
  source 1..15: mol_type = other DNA
cctggtttggctagt

SEQ ID NO: 7526 - DNA, 15 bp, synthetic construct
  source 1..15: mol_type = other DNA
ctgaattccacccgt

SEQ ID NO: 7527 - DNA, 15 bp, synthetic construct
  source 1..15: mol_type = other DNA
ggccctgttttacct

SEQ ID NO: 7528 - DNA, 15 bp, synthetic construct
  source 1..15: mol_type = other DNA
gcaatggagaaactt

SEQ ID NO: 7529 - DNA, 15 bp, synthetic construct
  source 1..15: mol_type = other DNA
ctgcaacgtgcttat

SEQ ID NO: 7530 - DNA, 15 bp, synthetic construct
  source 1..15: mol_type = other DNA
aaggacatgctctga

SEQ ID NO: 7531 - DNA, 15 bp, synthetic construct
  source 1..15: mol_type = other DNA
gcacagatgacattg

SEQ ID NO: 7532 - DNA, 15 bp, synthetic construct
  source 1..15: mol_type = other DNA
ccctgattacccaga

SEQ ID NO: 7533 - DNA, 15 bp, synthetic construct
  source 1..15: mol_type = other DNA
gcctaaggacctcct

SEQ ID NO: 7534 - DNA, 15 bp, synthetic construct
  source 1..15: mol_type = other DNA
gtgtggagccaattc

SEQ ID NO: 7535 - DNA, 15 bp, synthetic construct
  source 1..15: mol_type = other DNA
ctccgtggccgacat

SEQ ID NO: 7536 - DNA, 15 bp, synthetic construct
  source 1..15: mol_type = other DNA
gggtcatgtccacct

SEQ ID NO: 7537 - DNA, 15 bp, synthetic construct
  source 1..15: mol_type = other DNA
ccagatcagtgtcta

SEQ ID NO: 7538 - DNA, 15 bp, synthetic construct
  source 1..15: mol_type = other DNA
caagcacctaagagc

SEQ ID NO: 7539 - DNA, 15 bp, synthetic construct
  source 1..15: mol_type = other DNA
ggcgttctcatccag

SEQ ID NO: 7540 - DNA, 15 bp, synthetic construct
  source 1..15: mol_type = other DNA
caaaggttttgtagt

SEQ ID NO: 7541 - DNA, 15 bp, synthetic construct
  source 1..15: mol_type = other DNA
taggtagcgaagaat

SEQ ID NO: 7542 - DNA, 15 bp, synthetic construct
  source 1..15: mol_type = other DNA
gcaggatcccttagg

SEQ ID NO: 7543 - DNA, 15 bp, synthetic construct
  source 1..15: mol_type = other DNA
aatacattcctggtt

SEQ ID NO: 7544 - DNA, 15 bp, synthetic construct
  source 1..15: mol_type = other DNA
aaggaatgagccgtt

SEQ ID NO: 7545 - DNA, 15 bp, synthetic construct
  source 1..15: mol_type = other DNA
tctctgcgccttatc

SEQ ID NO: 7546 - DNA, 15 bp, synthetic construct
  source 1..15: mol_type = other DNA
atccttattctctcg

SEQ ID NO: 7547 - DNA, 15 bp, synthetic construct
  source 1..15: mol_type = other DNA
ggttctgtcttaggc

SEQ ID NO: 7548 - DNA, 15 bp, synthetic construct
  source 1..15: mol_type = other DNA
tcctgcgggatgatg

SEQ ID NO: 7549 - DNA, 15 bp, synthetic construct
  source 1..15: mol_type = other DNA
caaattcacgttatc

SEQ ID NO: 7550 - DNA, 15 bp, synthetic construct
  source 1..15: mol_type = other DNA
gccgaggtggtcttg

SEQ ID NO: 7551 - DNA, 15 bp, synthetic construct
  source 1..15: mol_type = other DNA
atggagggaaaccac

SEQ ID NO: 7552 - DNA, 15 bp, synthetic construct
  source 1..15: mol_type = other DNA
ttcagttggcacatc

SEQ ID NO: 7553 - DNA, 15 bp, synthetic construct
  source 1..15: mol_type = other DNA
gtctctgccgaagga

SEQ ID NO: 7554 - DNA, 15 bp, synthetic construct
  source 1..15: mol_type = other DNA
ctctgcaatgatttc

SEQ ID NO: 7555 - DNA, 15 bp, synthetic construct
  source 1..15: mol_type = other DNA
gcgacttgcctgagc

SEQ ID NO: 7556 - DNA, 15 bp, synthetic construct
  source 1..15: mol_type = other DNA
gactttggtggacgc

SEQ ID NO: 7557 - DNA, 15 bp, synthetic construct
  source 1..15: mol_type = other DNA
catcaccaaaaaagt

SEQ ID NO: 7558 - DNA, 15 bp, synthetic construct
  source 1..15: mol_type = other DNA
aatcgctgatctaca

SEQ ID NO: 7559 - DNA, 15 bp, synthetic construct
  source 1..15: mol_type = other DNA
gcccgtcctcattga

SEQ ID NO: 7560 - DNA, 15 bp, synthetic construct
  source 1..15: mol_type = other DNA
ccatcaatggtgtag

SEQ ID NO: 7561 - DNA, 15 bp, synthetic construct
  source 1..15: mol_type = other DNA
aaatcatcctggtaa

SEQ ID NO: 7562 - DNA, 15 bp, synthetic construct
  source 1..15: mol_type = other DNA
tctttatctttccag

SEQ ID NO: 7563 - DNA, 15 bp, synthetic construct
  source 1..15: mol_type = other DNA
ttgatatcacggtgg

SEQ ID NO: 7564 - DNA, 15 bp, synthetic construct
  source 1..15: mol_type = other DNA
tcgttctgttattgt

SEQ ID NO: 7565 - DNA, 15 bp, synthetic construct
  source 1..15: mol_type = other DNA
tctctctcggtgtat

SEQ ID NO: 7566 - DNA, 15 bp, synthetic construct
  source 1..15: mol_type = other DNA
tcaaaaagcacctcc

SEQ ID NO: 7567 - DNA, 15 bp, synthetic construct
  source 1..15: mol_type = other DNA
ccatttcctgcaaag

SEQ ID NO: 7568 - DNA, 15 bp, synthetic construct
  source 1..15: mol_type = other DNA
gtttctatctaggaa

SEQ ID NO: 7569 - DNA, 15 bp, synthetic construct
  source 1..15: mol_type = other DNA
gtagcacaacggccg

SEQ ID NO: 7570 - DNA, 15 bp, synthetic construct
  source 1..15: mol_type = other DNA
tcaggaccttgaact

SEQ ID NO: 7571 - DNA, 15 bp, synthetic construct
  source 1..15: mol_type = other DNA
ggacgagtaggcctg

SEQ ID NO: 7572 - DNA, 15 bp, synthetic construct
  source 1..15: mol_type = other DNA
gtctctgtctttaga

SEQ ID NO: 7573 - DNA, 15 bp, synthetic construct
  source 1..15: mol_type = other DNA
tgttcttagccgcga

SEQ ID NO: 7574 - DNA, 15 bp, synthetic construct
  source 1..15: mol_type = other DNA
cccgtgtctcgatgg

SEQ ID NO: 7575 - DNA, 15 bp, synthetic construct
  source 1..15: mol_type = other DNA
tcttaaggaacgcga

SEQ ID NO: 7576 - DNA, 15 bp, synthetic construct
  source 1..15: mol_type = other DNA
catctcatccttgag

SEQ ID NO: 7577 - DNA, 15 bp, synthetic construct
  source 1..15: mol_type = other DNA
ctggtacacgcggga

SEQ ID NO: 7578 - DNA, 15 bp, synthetic construct
  source 1..15: mol_type = other DNA
ttcaattctgcgctc

SEQ ID NO: 7579 - DNA, 15 bp, synthetic construct
  source 1..15: mol_type = other DNA
actggcaaatcggtc

SEQ ID NO: 7580 - DNA, 15 bp, synthetic construct
  source 1..15: mol_type = other DNA
ggcgtcaatctcgca

SEQ ID NO: 7581 - DNA, 15 bp, synthetic construct
  source 1..15: mol_type = other DNA
caggtataccactgg

SEQ ID NO: 7582 - DNA, 15 bp, synthetic construct
  source 1..15: mol_type = other DNA
gacaacgggcaaggt

SEQ ID NO: 7583 - DNA, 15 bp, synthetic construct
  source 1..15: mol_type = other DNA
ccctcatgaacagct

SEQ ID NO: 7584 - DNA, 15 bp, synthetic construct
  source 1..15: mol_type = other DNA
ggtcacacttgacgg

SEQ ID NO: 7585 - DNA, 15 bp, synthetic construct
  source 1..15: mol_type = other DNA
tccacttgcattggc

SEQ ID NO: 7586 - DNA, 15 bp, synthetic construct
  source 1..15: mol_type = other DNA
cctcgtctgctttgg

SEQ ID NO: 7587 - DNA, 15 bp, synthetic construct
  source 1..15: mol_type = other DNA
acccattcctgtaga

SEQ ID NO: 7588 - DNA, 15 bp, synthetic construct
  source 1..15: mol_type = other DNA
gaatgttgagaatgg

SEQ ID NO: 7589 - DNA, 15 bp, synthetic construct
  source 1..15: mol_type = other DNA
ccttgcttgcggacg

SEQ ID NO: 7590 - DNA, 15 bp, synthetic construct
  source 1..15: mol_type = other DNA
gaggtgggcagtaag

SEQ ID NO: 7591 - DNA, 15 bp, synthetic construct
  source 1..15: mol_type = other DNA
tcatgtgggtcatat

SEQ ID NO: 7592 - DNA, 15 bp, synthetic construct
  source 1..15: mol_type = other DNA
gggcaatatgcagca

SEQ ID NO: 7593 - DNA, 15 bp, synthetic construct
  source 1..15: mol_type = other DNA
ttgacacaaccagga

SEQ ID NO: 7594 - DNA, 15 bp, synthetic construct
  source 1..15: mol_type = other DNA
atgtctttcaggatt

SEQ ID NO: 7595 - DNA, 15 bp, synthetic construct
  source 1..15: mol_type = other DNA
agggcagtgatggag

SEQ ID NO: 7596 - DNA, 15 bp, synthetic construct
  source 1..15: mol_type = other DNA
ttcaggagacttctg

SEQ ID NO: 7597 - DNA, 15 bp, synthetic construct
  source 1..15: mol_type = other DNA
gctcggagttcagca

SEQ ID NO: 7598 - DNA, 15 bp, synthetic construct
  source 1..15: mol_type = other DNA
caaaacacggaagtc

SEQ ID NO: 7599 - DNA, 15 bp, synthetic construct
  source 1..15: mol_type = other DNA
cacatggaatctgtg

SEQ ID NO: 7600 - DNA, 15 bp, synthetic construct
  source 1..15: mol_type = other DNA
ttgcagtaggttggt

SEQ ID NO: 7601 - DNA, 15 bp, synthetic construct
  source 1..15: mol_type = other DNA
tccgaggtgccaaat

SEQ ID NO: 7602 - DNA, 15 bp, synthetic construct
  source 1..15: mol_type = other DNA
gggttgagcagatag

SEQ ID NO: 7603 - DNA, 15 bp, synthetic construct
  source 1..15: mol_type = other DNA
gcctgcactcttcag

SEQ ID NO: 7604 - DNA, 15 bp, synthetic construct
  source 1..15: mol_type = other DNA
agggagacccaccgt

SEQ ID NO: 7605 - DNA, 15 bp, synthetic construct
  source 1..15: mol_type = other DNA
gcctcgacacctgtc

SEQ ID NO: 7606 - DNA, 15 bp, synthetic construct
  source 1..15: mol_type = other DNA
cgtcttcactatggc

SEQ ID NO: 7607 - DNA, 15 bp, synthetic construct
  source 1..15: mol_type = other DNA
tggagaatgtcccac

SEQ ID NO: 7608 - DNA, 15 bp, synthetic construct
  source 1..15: mol_type = other DNA
gtcgatgcaggtaag

SEQ ID NO: 7609 - DNA, 15 bp, synthetic construct
  source 1..15: mol_type = other DNA
taaccctctcaacag

SEQ ID NO: 7610 - DNA, 15 bp, synthetic construct
  source 1..15: mol_type = other DNA
agcgtcttcgtgatg

SEQ ID NO: 7611 - DNA, 15 bp, synthetic construct
  source 1..15: mol_type = other DNA
gttcccgggatagaa

SEQ ID NO: 7612 - DNA, 15 bp, synthetic construct
  source 1..15: mol_type = other DNA
cctacagaccacgtt

SEQ ID NO: 7613 - DNA, 15 bp, synthetic construct
  source 1..15: mol_type = other DNA
agctccacaagtagg

SEQ ID NO: 7614 - DNA, 15 bp, synthetic construct
  source 1..15: mol_type = other DNA
ctcgtagtatccatt

SEQ ID NO: 7615 - DNA, 15 bp, synthetic construct
  source 1..15: mol_type = other DNA
catcttcatgatggc

SEQ ID NO: 7616 - DNA, 15 bp, synthetic construct
  source 1..15: mol_type = other DNA
tcggttccggcactg

SEQ ID NO: 7617 - DNA, 15 bp, synthetic construct
  source 1..15: mol_type = other DNA
caggagactgctatt

SEQ ID NO: 7618 - DNA, 15 bp, synthetic construct
  source 1..15: mol_type = other DNA
cctagctaaaaggag

SEQ ID NO: 7619 - DNA, 15 bp, synthetic construct
  source 1..15: mol_type = other DNA
cagacgacattggca

SEQ ID NO: 7620 - DNA, 15 bp, synthetic construct
  source 1..15: mol_type = other DNA
gcctgcaaaccacat

SEQ ID NO: 7621 - DNA, 15 bp, synthetic construct
  source 1..15: mol_type = other DNA
tcagaatggaggatt

SEQ ID NO: 7622 - DNA, 15 bp, synthetic construct
  source 1..15: mol_type = other DNA
gagcctcggtatagg

SEQ ID NO: 7623 - DNA, 15 bp, synthetic construct
  source 1..15: mol_type = other DNA
attcgtgtcctgagc

SEQ ID NO: 7624 - DNA, 15 bp, synthetic construct
  source 1..15: mol_type = other DNA
agcctgagtagggaa

SEQ ID NO: 7625 - DNA, 15 bp, synthetic construct
  source 1..15: mol_type = other DNA
catccaggacaatgg

SEQ ID NO: 7626 - DNA, 15 bp, synthetic construct
  source 1..15: mol_type = other DNA
ggaactgcggtaggg

SEQ ID NO: 7627 - DNA, 15 bp, synthetic construct
  source 1..15: mol_type = other DNA
agacacatttcaagg

SEQ ID NO: 7628 - DNA, 15 bp, synthetic construct
  source 1..15: mol_type = other DNA
ctccacagataggac

SEQ ID NO: 7629 - DNA, 15 bp, synthetic construct
  source 1..15: mol_type = other DNA
tgctgagtttccggg

SEQ ID NO: 7630 - DNA, 15 bp, synthetic construct
  source 1..15: mol_type = other DNA
gagagggtggtgttt

SEQ ID NO: 7631 - DNA, 15 bp, synthetic construct
  source 1..15: mol_type = other DNA
ctacgcaatgatttg

SEQ ID NO: 7632 - DNA, 15 bp, synthetic construct
  source 1..15: mol_type = other DNA
tcactctgacactca

SEQ ID NO: 7633 - DNA, 15 bp, synthetic construct
  source 1..15: mol_type = other DNA
ctgcaggaagttatt

SEQ ID NO: 7634 - DNA, 15 bp, synthetic construct
  source 1..15: mol_type = other DNA
aaagttaaacatccc

SEQ ID NO: 7635 - DNA, 15 bp, synthetic construct
  source 1..15: mol_type = other DNA
tgcagtgggaagaaa

SEQ ID NO: 7636 - DNA, 15 bp, synthetic construct
  source 1..15: mol_type = other DNA
gccctagatcacttt

SEQ ID NO: 7637 - DNA, 15 bp, synthetic construct
  source 1..15: mol_type = other DNA
ctgccattgttgttg

SEQ ID NO: 7638 - DNA, 15 bp, synthetic construct
  source 1..15: mol_type = other DNA
ccagtgcttttcggg

SEQ ID NO: 7639 - DNA, 15 bp, synthetic construct
  source 1..15: mol_type = other DNA
ccagagcatacctga

SEQ ID NO: 7640 - DNA, 15 bp, synthetic construct
  source 1..15: mol_type = other DNA
cctgcacgtttctgc

SEQ ID NO: 7641 - DNA, 15 bp, synthetic construct
  source 1..15: mol_type = other DNA
tccttgtctggaggt

SEQ ID NO: 7642 - DNA, 15 bp, synthetic construct
  source 1..15: mol_type = other DNA
cacagtattgactcc

SEQ ID NO: 7643 - DNA, 15 bp, synthetic construct
  source 1..15: mol_type = other DNA
gtcacagtgacttca

SEQ ID NO: 7644 - DNA, 15 bp, synthetic construct
  source 1..15: mol_type = other DNA
ctaaaggacctaaag

SEQ ID NO: 7645 - DNA, 15 bp, synthetic construct
  source 1..15: mol_type = other DNA
taattgctttccagt

SEQ ID NO: 7646 - DNA, 15 bp, synthetic construct
  source 1..15: mol_type = other DNA
tgactgagtacttcc

SEQ ID NO: 7647 - DNA, 15 bp, synthetic construct
  source 1..15: mol_type = other DNA
aatgacatcttctgc

SEQ ID NO: 7648 - DNA, 15 bp, synthetic construct
  source 1..15: mol_type = other DNA
agtgggatacgcatg

SEQ ID NO: 7649 - DNA, 15 bp, synthetic construct
  source 1..15: mol_type = other DNA
tgagtgttggtccca

SEQ ID NO: 7650 - DNA, 15 bp, synthetic construct
  source 1..15: mol_type = other DNA
tcattctggttgctg

SEQ ID NO: 7651 - DNA, 15 bp, synthetic construct
  source 1..15: mol_type = other DNA
ctgctacgccaaagc

SEQ ID NO: 7652 - DNA, 15 bp, synthetic construct
  source 1..15: mol_type = other DNA
acagaaagatgctgg

SEQ ID NO: 7653 - DNA, 15 bp, synthetic construct
  source 1..15: mol_type = other DNA
gtatgggtatccata

SEQ ID NO: 7654 - DNA, 15 bp, synthetic construct
  source 1..15: mol_type = other DNA
agatagcgccatctc

SEQ ID NO: 7655 - DNA, 15 bp, synthetic construct
  source 1..15: mol_type = other DNA
tggtagctgaagcct

SEQ ID NO: 7656 - DNA, 15 bp, synthetic construct
  source 1..15: mol_type = other DNA
aactcctttttccac

SEQ ID NO: 7657 - DNA, 15 bp, synthetic construct
  source 1..15: mol_type = other DNA
caggcgtagttccat

SEQ ID NO: 7658 - DNA, 15 bp, synthetic construct
  source 1..15: mol_type = other DNA
gcccaatccaggaga

SEQ ID NO: 7659 - DNA, 15 bp, synthetic construct
  source 1..15: mol_type = other DNA
gccatggtgactagg

SEQ ID NO: 7660 - DNA, 15 bp, synthetic construct
  source 1..15: mol_type = other DNA
ctcatttgagagtga

SEQ ID NO: 7661 - DNA, 15 bp, synthetic construct
  source 1..15: mol_type = other DNA
gagtacaaatggttg

SEQ ID NO: 7662 - DNA, 15 bp, synthetic construct
  source 1..15: mol_type = other DNA
agttcccaatctgaa

SEQ ID NO: 7663 - DNA, 15 bp, synthetic construct
  source 1..15: mol_type = other DNA
ctaggaatcgtgggc

SEQ ID NO: 7664 - DNA, 15 bp, synthetic construct
  source 1..15: mol_type = other DNA
tctgctaaaatgaac

SEQ ID NO: 7665 - DNA, 15 bp, synthetic construct
  source 1..15: mol_type = other DNA
cttctgttgattcaa

SEQ ID NO: 7666 - DNA, 15 bp, synthetic construct
  source 1..15: mol_type = other DNA
catcgcatgtatttt

SEQ ID NO: 7667 - DNA, 15 bp, synthetic construct
  source 1..15: mol_type = other DNA
tgtatcaaggtgccg

SEQ ID NO: 7668 - DNA, 15 bp, synthetic construct
  source 1..15: mol_type = other DNA
gaccagggcagtata

SEQ ID NO: 7669 - DNA, 15 bp, synthetic construct
  source 1..15: mol_type = other DNA
gcattcttcggcgtt

SEQ ID NO: 7670 - DNA, 15 bp, synthetic construct
  source 1..15: mol_type = other DNA
actagggtgtaaggt

SEQ ID NO: 7671 - DNA, 15 bp, synthetic construct
  source 1..15: mol_type = other DNA
atagttaaccgggct

SEQ ID NO: 7672 - DNA, 15 bp, synthetic construct
  source 1..15: mol_type = other DNA
ctgttctgcatattt

SEQ ID NO: 7673 - DNA, 15 bp, synthetic construct
  source 1..15: mol_type = other DNA
gatgacactgtccct

SEQ ID NO: 7674 - DNA, 15 bp, synthetic construct
  source 1..15: mol_type = other DNA
tgctggcgtaaaagg

SEQ ID NO: 7675 - DNA, 15 bp, synthetic construct
  source 1..15: mol_type = other DNA
gatcggaatagaagt

SEQ ID NO: 7676 - DNA, 15 bp, synthetic construct
  source 1..15: mol_type = other DNA
tggcaaggtccaccg

SEQ ID NO: 7677 - DNA, 15 bp, synthetic construct
  source 1..15: mol_type = other DNA
cctccaacacgaacc

SEQ ID NO: 7678 - DNA, 15 bp, synthetic construct
  source 1..15: mol_type = other DNA
caatgagtgctttca

SEQ ID NO: 7679 - DNA, 15 bp, synthetic construct
  source 1..15: mol_type = other DNA
gtgaatctaccatgg

SEQ ID NO: 7680 - DNA, 15 bp, synthetic construct
  source 1..15: mol_type = other DNA
cagcaaactgtgttc

SEQ ID NO: 7681 - DNA, 15 bp, synthetic construct
  source 1..15: mol_type = other DNA
aacttgctgatgttc

SEQ ID NO: 7682 - DNA, 15 bp, synthetic construct
  source 1..15: mol_type = other DNA
tcatcactgatggct

SEQ ID NO: 7683 - DNA, 15 bp, synthetic construct
  source 1..15: mol_type = other DNA
ttggcaaatctgagc

SEQ ID NO: 7684 - DNA, 15 bp, synthetic construct
  source 1..15: mol_type = other DNA
ttatgtgagactcat

SEQ ID NO: 7685 - DNA, 15 bp, synthetic construct
  source 1..15: mol_type = other DNA
ctgaaggaccacatt

SEQ ID NO: 7686 - DNA, 15 bp, synthetic construct
  source 1..15: mol_type = other DNA
agctgtacttccgct

SEQ ID NO: 7687 - DNA, 15 bp, synthetic construct
  source 1..15: mol_type = other DNA
tgtctaatcagccga

SEQ ID NO: 7688 - DNA, 15 bp, synthetic construct
  source 1..15: mol_type = other DNA
ggcaatgctagtgtc

SEQ ID NO: 7689 - DNA, 15 bp, synthetic construct
  source 1..15: mol_type = other DNA
gcagtatttccacag

SEQ ID NO: 7690 - DNA, 15 bp, synthetic construct
  source 1..15: mol_type = other DNA
aaaggaattcgctcc

SEQ ID NO: 7691 - DNA, 15 bp, synthetic construct
  source 1..15: mol_type = other DNA
gcatcatagttagat

SEQ ID NO: 7692 - DNA, 15 bp, synthetic construct
  source 1..15: mol_type = other DNA
ttcttcacgcaggtg

SEQ ID NO: 7693 - DNA, 15 bp, synthetic construct
  source 1..15: mol_type = other DNA
cgcacgagccgtgat

SEQ ID NO: 7694 - DNA, 15 bp, synthetic construct
  source 1..15: mol_type = other DNA
ccgtcaatgtagtgg

SEQ ID NO: 7695 - DNA, 15 bp, synthetic construct
  source 1..15: mol_type = other DNA
ttggttttctgaccg

SEQ ID NO: 7696 - DNA, 15 bp, synthetic construct
  source 1..15: mol_type = other DNA
ggtgtccttgcacgt

SEQ ID NO: 7697 - DNA, 15 bp, synthetic construct
  source 1..15: mol_type = other DNA
tcggctgacattccg

SEQ ID NO: 7698 - DNA, 15 bp, synthetic construct
  source 1..15: mol_type = other DNA
cacctcacagttatt

SEQ ID NO: 7699 - DNA, 15 bp, synthetic construct
  source 1..15: mol_type = other DNA
agcgtaatcccaagg

SEQ ID NO: 7700 - DNA, 15 bp, synthetic construct
  source 1..15: mol_type = other DNA
agtgcccaactgcgt

SEQ ID NO: 7701 - DNA, 15 bp, synthetic construct
  source 1..15: mol_type = other DNA
gcgtacttccagacc

SEQ ID NO: 7702 - DNA, 15 bp, synthetic construct
  source 1..15: mol_type = other DNA
cccattgggacagct

SEQ ID NO: 7703 - DNA, 15 bp, synthetic construct
  source 1..15: mol_type = other DNA
cagaaggttgcactt

SEQ ID NO: 7704 - DNA, 15 bp, synthetic construct
  source 1..15: mol_type = other DNA
gatgtggagatcgcc

SEQ ID NO: 7705 - DNA, 15 bp, synthetic construct
  source 1..15: mol_type = other DNA
cttcgcacttcttac

SEQ ID NO: 7706 - DNA, 15 bp, synthetic construct
  source 1..15: mol_type = other DNA
ctctgcacataggta

SEQ ID NO: 7707 - DNA, 15 bp, synthetic construct
  source 1..15: mol_type = other DNA
gaaccagtattagga

SEQ ID NO: 7708 - DNA, 15 bp, synthetic construct
  source 1..15: mol_type = other DNA
gatgcatcaaggtgg

SEQ ID NO: 7709 - DNA, 15 bp, synthetic construct
  source 1..15: mol_type = other DNA
ctttcactttctcct

SEQ ID NO: 7710 - DNA, 15 bp, synthetic construct
  source 1..15: mol_type = other DNA
gcctgcttctttgaa

SEQ ID NO: 7711 - DNA, 15 bp, synthetic construct
  source 1..15: mol_type = other DNA
tgccctgtttcgtaa

SEQ ID NO: 7712 - DNA, 15 bp, synthetic construct
  source 1..15: mol_type = other DNA
caatctgatgggatc

SEQ ID NO: 7713 - DNA, 15 bp, synthetic construct
  source 1..15: mol_type = other DNA
ttgaggtaaagtgtt

SEQ ID NO: 7714 - DNA, 15 bp, synthetic construct
  source 1..15: mol_type = other DNA
aggatttaatgccat

SEQ ID NO: 7715 - DNA, 15 bp, synthetic construct
  source 1..15: mol_type = other DNA
tgagaaggtaaaagt

SEQ ID NO: 7716 - DNA, 15 bp, synthetic construct
  source 1..15: mol_type = other DNA
ctttttcaattgcca

SEQ ID NO: 7717 - DNA, 15 bp, synthetic construct
  source 1..15: mol_type = other DNA
ccacctctacgaaca

SEQ ID NO: 7718 - DNA, 15 bp, synthetic construct
  source 1..15: mol_type = other DNA
ccctaactgcatgct

SEQ ID NO: 7719 - DNA, 15 bp, synthetic construct
  source 1..15: mol_type = other DNA
ggtgttttggtaggc

SEQ ID NO: 7720 - DNA, 15 bp, synthetic construct
  source 1..15: mol_type = other DNA
tgccggaaaacttct

SEQ ID NO: 7721 - DNA, 15 bp, synthetic construct
  source 1..15: mol_type = other DNA
tacaagcactggtgt

SEQ ID NO: 7722 - DNA, 15 bp, synthetic construct
  source 1..15: mol_type = other DNA
ggtagaagtgcgcgc

SEQ ID NO: 7723 - DNA, 15 bp, synthetic construct
  source 1..15: mol_type = other DNA
ggctcacacgctgga

SEQ ID NO: 7724 - DNA, 15 bp, synthetic construct
  source 1..15: mol_type = other DNA
atgcctataggagct

SEQ ID NO: 7725 - DNA, 15 bp, synthetic construct
  source 1..15: mol_type = other DNA
ttcagaagcaaaaca

SEQ ID NO: 7726 - DNA, 15 bp, synthetic construct
  source 1..15: mol_type = other DNA
cctgaatccagcgtc

SEQ ID NO: 7727 - DNA, 15 bp, synthetic construct
  source 1..15: mol_type = other DNA
tcctttccggaagga

SEQ ID NO: 7728 - DNA, 15 bp, synthetic construct
  source 1..15: mol_type = other DNA
tgttccaaaagccgg

SEQ ID NO: 7729 - DNA, 15 bp, synthetic construct
  source 1..15: mol_type = other DNA
aggccggttgcacag

SEQ ID NO: 7730 - DNA, 15 bp, synthetic construct
  source 1..15: mol_type = other DNA
agtgaggcaatcctg

SEQ ID NO: 7731 - DNA, 15 bp, synthetic construct
  source 1..15: mol_type = other DNA
agcagtctccgcatc

SEQ ID NO: 7732 - DNA, 15 bp, synthetic construct
  source 1..15: mol_type = other DNA
gccgtcgcttgatga

SEQ ID NO: 7733 - DNA, 15 bp, synthetic construct
  source 1..15: mol_type = other DNA
gcaggatcccacgtc

SEQ ID NO: 7734 - DNA, 15 bp, synthetic construct
  source 1..15: mol_type = other DNA
cacgaagcagaggtg

SEQ ID NO: 7735 - DNA, 15 bp, synthetic construct
  source 1..15: mol_type = other DNA
cagcagaatgccaac

SEQ ID NO: 7736 - DNA, 15 bp, synthetic construct
  source 1..15: mol_type = other DNA
ggtccaaaacaggtc

SEQ ID NO: 7737 - DNA, 15 bp, synthetic construct
  source 1..15: mol_type = other DNA
gcacggcaaacagtg

SEQ ID NO: 7738 - DNA, 15 bp, synthetic construct
  source 1..15: mol_type = other DNA
ctgtgccaaaagcgc

SEQ ID NO: 7739 - DNA, 15 bp, synthetic construct
  source 1..15: mol_type = other DNA
catctggaaacttcc

SEQ ID NO: 7740 - DNA, 15 bp, synthetic construct
  source 1..15: mol_type = other DNA
ttgggcatcgctccg

SEQ ID NO: 7741 - DNA, 15 bp, synthetic construct
  source 1..15: mol_type = other DNA
ccggattacttgcag

SEQ ID NO: 7742 - DNA, 15 bp, synthetic construct
  source 1..15: mol_type = other DNA
atcaaagctctccgg

SEQ ID NO: 7743 - DNA, 15 bp, synthetic construct
  source 1..15: mol_type = other DNA
aagatcttcttgcag

SEQ ID NO: 7744 - DNA, 15 bp, synthetic construct
  source 1..15: mol_type = other DNA
cttgctgcacttctc

SEQ ID NO: 7745 - DNA, 15 bp, synthetic construct
  source 1..15: mol_type = other DNA
ctgtaaggtcctagc

SEQ ID NO: 7746 - DNA, 15 bp, synthetic construct
  source 1..15: mol_type = other DNA
tacgctgcacttgcg

SEQ ID NO: 7747 - DNA, 15 bp, synthetic construct
  source 1..15: mol_type = other DNA
gggagtacgagcagt

SEQ ID NO: 7748 - DNA, 15 bp, synthetic construct
  source 1..15: mol_type = other DNA
cagcacttcggatag

SEQ ID NO: 7749 - DNA, 15 bp, synthetic construct
  source 1..15: mol_type = other DNA
agagccctaggtaaa

SEQ ID NO: 7750 - DNA, 15 bp, synthetic construct
  source 1..15: mol_type = other DNA
tttgtccatgctcac

SEQ ID NO: 7751 - DNA, 15 bp, synthetic construct
  source 1..15: mol_type = other DNA
ggagctttggcatac

SEQ ID NO: 7752 - DNA, 15 bp, synthetic construct
  source 1..15: mol_type = other DNA
gcatgatcttgatcg

SEQ ID NO: 7753 - DNA, 15 bp, synthetic construct
  source 1..15: mol_type = other DNA
aaagcgctagtatcc

SEQ ID NO: 7754 - DNA, 15 bp, synthetic construct
  source 1..15: mol_type = other DNA
ccaaatccgctaatg

SEQ ID NO: 7755 - DNA, 15 bp, synthetic construct
  source 1..15: mol_type = other DNA
agcgtagggtatcgc

SEQ ID NO: 7756 - DNA, 15 bp, synthetic construct
  source 1..15: mol_type = other DNA
gatggcaagtcgtgc

SEQ ID NO: 7757 - DNA, 15 bp, synthetic construct
  source 1..15: mol_type = other DNA
ttggtaaacggctca

SEQ ID NO: 7758 - DNA, 15 bp, synthetic construct
  source 1..15: mol_type = other DNA
cggcgtattaaggtc

SEQ ID NO: 7759 - DNA, 15 bp, synthetic construct
  source 1..15: mol_type = other DNA
ggcgagcagatacaa

SEQ ID NO: 7760 - DNA, 15 bp, synthetic construct
  source 1..15: mol_type = other DNA
ccgtacccaaatgta

SEQ ID NO: 7761 - DNA, 15 bp, synthetic construct
  source 1..15: mol_type = other DNA
gcttgatcctgtagt

SEQ ID NO: 7762 - DNA, 15 bp, synthetic construct
  source 1..15: mol_type = other DNA
taggagggtccttct

SEQ ID NO: 7763 - DNA, 15 bp, synthetic construct
  source 1..15: mol_type = other DNA
atatggcgactgtgt

SEQ ID NO: 7764 - DNA, 15 bp, synthetic construct
  source 1..15: mol_type = other DNA
gcggtgtcagtgatc

SEQ ID NO: 7765 - DNA, 15 bp, synthetic construct
  source 1..15: mol_type = other DNA
gtggagtcgtctatg

SEQ ID NO: 7766 - DNA, 15 bp, synthetic construct
  source 1..15: mol_type = other DNA
tctccggtatatgct

SEQ ID NO: 7767 - DNA, 15 bp, synthetic construct
  source 1..15: mol_type = other DNA
tcctacatagcacga

SEQ ID NO: 7768 - DNA, 15 bp, synthetic construct
  source 1..15: mol_type = other DNA
cctcataggtcgtgc

SEQ ID NO: 7769 - DNA, 15 bp, synthetic construct
  source 1..15: mol_type = other DNA
catgcctgagactgt

SEQ ID NO: 7770 - DNA, 15 bp, synthetic construct
  source 1..15: mol_type = other DNA
ttatacactgggttg

SEQ ID NO: 7771 - DNA, 15 bp, synthetic construct
  source 1..15: mol_type = other DNA
cagcacttatgttta

SEQ ID NO: 7772 - DNA, 15 bp, synthetic construct
  source 1..15: mol_type = other DNA
acattcacaactctg

SEQ ID NO: 7773 - DNA, 15 bp, synthetic construct
  source 1..15: mol_type = other DNA
gcactcactgctgtc

SEQ ID NO: 7774 - DNA, 15 bp, synthetic construct
  source 1..15: mol_type = other DNA
ctttttgttttctgg

SEQ ID NO: 7775 - DNA, 15 bp, synthetic construct
  source 1..15: mol_type = other DNA
catgaggactgaaaa

SEQ ID NO: 7776 - DNA, 15 bp, synthetic construct
  source 1..15: mol_type = other DNA
ttgctctcagttcaa

SEQ ID NO: 7777 - DNA, 15 bp, synthetic construct
  source 1..15: mol_type = other DNA
gtccaccgcataatt

SEQ ID NO: 7778 - DNA, 15 bp, synthetic construct
  source 1..15: mol_type = other DNA
tcagatacaggtaac

SEQ ID NO: 7779 - DNA, 15 bp, synthetic construct
  source 1..15: mol_type = other DNA
tgactcactgcggtc

SEQ ID NO: 7780 - DNA, 15 bp, synthetic construct
  source 1..15: mol_type = other DNA
ggacgtctgtgaagg

SEQ ID NO: 7781 - DNA, 15 bp, synthetic construct
  source 1..15: mol_type = other DNA
tctagagaagctacc

SEQ ID NO: 7782 - DNA, 15 bp, synthetic construct
  source 1..15: mol_type = other DNA
cacacaaaccaccag

SEQ ID NO: 7783 - DNA, 15 bp, synthetic construct
  source 1..15: mol_type = other DNA
gttgacctgtctcca

SEQ ID NO: 7784 - DNA, 15 bp, synthetic construct
  source 1..15: mol_type = other DNA
tcaagaggatgataa

SEQ ID NO: 7785 - DNA, 15 bp, synthetic construct
  source 1..15: mol_type = other DNA
ctccttcaggacggg

SEQ ID NO: 7786 - DNA, 15 bp, synthetic construct
  source 1..15: mol_type = other DNA
tctctcacaatattg

SEQ ID NO: 7787 - DNA, 15 bp, synthetic construct
  source 1..15: mol_type = other DNA
ggatgaaggctggat

SEQ ID NO: 7788 - DNA, 15 bp, synthetic construct
  source 1..15: mol_type = other DNA
tcacttgaggtgtag

SEQ ID NO: 7789 - DNA, 15 bp, synthetic construct
  source 1..15: mol_type = other DNA
ccaggaattgaaaag

SEQ ID NO: 7790 - DNA, 15 bp, synthetic construct
  source 1..15: mol_type = other DNA
gtctctctgcaatcc

SEQ ID NO: 7791 - DNA, 15 bp, synthetic construct
  source 1..15: mol_type = other DNA
gggtagggaagatga

SEQ ID NO: 7792 - DNA, 15 bp, synthetic construct
  source 1..15: mol_type = other DNA
tggctgtgtgttgaa

SEQ ID NO: 7793 - DNA, 15 bp, synthetic construct
  source 1..15: mol_type = other DNA
catcatgcggaaccg

SEQ ID NO: 7794 - DNA, 15 bp, synthetic construct
  source 1..15: mol_type = other DNA
tctgtgatcttgtcc

SEQ ID NO: 7795 - DNA, 15 bp, synthetic construct
  source 1..15: mol_type = other DNA
ctcgttcccttggat

SEQ ID NO: 7796 - DNA, 15 bp, synthetic construct
  source 1..15: mol_type = other DNA
cctgtgagagaacag

SEQ ID NO: 7797 - DNA, 15 bp, synthetic construct
  source 1..15: mol_type = other DNA
ttagagcgtttgatc

SEQ ID NO: 7798 - DNA, 15 bp, synthetic construct
  source 1..15: mol_type = other DNA
gacctgatcatggag

SEQ ID NO: 7799 - DNA, 15 bp, synthetic construct
  source 1..15: mol_type = other DNA
cagtagcatcagcgg

SEQ ID NO: 7800 - DNA, 15 bp, synthetic construct
  source 1..15: mol_type = other DNA
caagtctctataacc

SEQ ID NO: 7801 - DNA, 15 bp, synthetic construct
  source 1..15: mol_type = other DNA
atggtagcctgaagc

SEQ ID NO: 7802 - DNA, 15 bp, synthetic construct
  source 1..15: mol_type = other DNA
ttgtttctagggtgc

SEQ ID NO: 7803 - DNA, 15 bp, synthetic construct
  source 1..15: mol_type = other DNA
gggaaatcaaatcaa

SEQ ID NO: 7804 - DNA, 15 bp, synthetic construct
  source 1..15: mol_type = other DNA
agagctctacactga

SEQ ID NO: 7805 - DNA, 15 bp, synthetic construct
  source 1..15: mol_type = other DNA
tccaagagcaagtta

SEQ ID NO: 7806 - DNA, 15 bp, synthetic construct
  source 1..15: mol_type = other DNA
accatgccctctaca

SEQ ID NO: 7807 - DNA, 15 bp, synthetic construct
  source 1..15: mol_type = other DNA
ctctctggcgcttgt

SEQ ID NO: 7808 - DNA, 15 bp, synthetic construct
  source 1..15: mol_type = other DNA
attcccacttcgtag

SEQ ID NO: 7809 - DNA, 15 bp, synthetic construct
  source 1..15: mol_type = other DNA
gcaagcaaatgaatg

SEQ ID NO: 7810 - DNA, 15 bp, synthetic construct
  source 1..15: mol_type = other DNA
cagacgagaccaatc

SEQ ID NO: 7811 - DNA, 15 bp, synthetic construct
  source 1..15: mol_type = other DNA
tagccatacttccct

SEQ ID NO: 7812 - DNA, 15 bp, synthetic construct
  source 1..15: mol_type = other DNA
tggaacccatgaccg

SEQ ID NO: 7813 - DNA, 15 bp, synthetic construct
  source 1..15: mol_type = other DNA
tcctcctgtttttat

SEQ ID NO: 7814 - DNA, 15 bp, synthetic construct
  source 1..15: mol_type = other DNA
tttggtaccgcagtc

SEQ ID NO: 7815 - DNA, 15 bp, synthetic construct
  source 1..15: mol_type = other DNA
aagcttcactgaagg

SEQ ID NO: 7816 - DNA, 15 bp, synthetic construct
  source 1..15: mol_type = other DNA
tgagttcagctgtga

SEQ ID NO: 7817 - DNA, 15 bp, synthetic construct
  source 1..15: mol_type = other DNA
gtgaattcgttttgg

SEQ ID NO: 7818 - DNA, 15 bp, synthetic construct
  source 1..15: mol_type = other DNA
tgactgttatagcaa

SEQ ID NO: 7819 - DNA, 15 bp, synthetic construct
  source 1..15: mol_type = other DNA
ctcagtaagtgctgg

SEQ ID NO: 7820 - DNA, 15 bp, synthetic construct
  source 1..15: mol_type = other DNA
tcaacctgtctattg

SEQ ID NO: 7821 - DNA, 15 bp, synthetic construct
  source 1..15: mol_type = other DNA
atggtggcaatagag

SEQ ID NO: 7822 - DNA, 15 bp, synthetic construct
  source 1..15: mol_type = other DNA
tgcgctgagcagaaa

SEQ ID NO: 7823 - DNA, 15 bp, synthetic construct
  source 1..15: mol_type = other DNA
cttacattggtgatt

SEQ ID NO: 7824 - DNA, 15 bp, synthetic construct
  source 1..15: mol_type = other DNA
gtgagatggaaccta

SEQ ID NO: 7825 - DNA, 15 bp, synthetic construct
  source 1..15: mol_type = other DNA
gaacttgaagtgctt

SEQ ID NO: 7826 - DNA, 15 bp, synthetic construct
  source 1..15: mol_type = other DNA
caaagttttcctggc

SEQ ID NO: 7827 - DNA, 15 bp, synthetic construct
  source 1..15: mol_type = other DNA
acgctaaatgggcaa

SEQ ID NO: 7828 - DNA, 15 bp, synthetic construct
  source 1..15: mol_type = other DNA
gtgttctgttgtctg

SEQ ID NO: 7829 - DNA, 15 bp, synthetic construct
  source 1..15: mol_type = other DNA
cttgatatccttccc

SEQ ID NO: 7830 - DNA, 15 bp, synthetic construct
  source 1..15: mol_type = other DNA
ggaatgacataccat

SEQ ID NO: 7831 - DNA, 15 bp, synthetic construct
  source 1..15: mol_type = other DNA
gcagtgggtagtgca

SEQ ID NO: 7832 - DNA, 15 bp, synthetic construct
  source 1..15: mol_type = other DNA
aatgtcacccaatgt

SEQ ID NO: 7833 - DNA, 15 bp, synthetic construct
  source 1..15: mol_type = other DNA
acatgttgagcacca

SEQ ID NO: 7834 - DNA, 15 bp, synthetic construct
  source 1..15: mol_type = other DNA
ttatgtcgccgttga

SEQ ID NO: 7835 - DNA, 15 bp, synthetic construct
  source 1..15: mol_type = other DNA
agcaatgcaatagtt

SEQ ID NO: 7836 - DNA, 15 bp, synthetic construct
  source 1..15: mol_type = other DNA
tgctgattctcttga

SEQ ID NO: 7837 - DNA, 15 bp, synthetic construct
  source 1..15: mol_type = other DNA
tcctgtaggaccgga

SEQ ID NO: 7838 - DNA, 15 bp, synthetic construct
  source 1..15: mol_type = other DNA
tgggtggttgatgct

SEQ ID NO: 7839 - DNA, 15 bp, synthetic construct
  source 1..15: mol_type = other DNA
taagctgccataata

SEQ ID NO: 7840 - DNA, 15 bp, synthetic construct
  source 1..15: mol_type = other DNA
tccatttgaatagag

SEQ ID NO: 7841 - DNA, 15 bp, synthetic construct
  source 1..15: mol_type = other DNA
ctcaagattatcatc

SEQ ID NO: 7842 - DNA, 15 bp, synthetic construct
  source 1..15: mol_type = other DNA
acacacttcttgctt

SEQ ID NO: 7843 - DNA, 15 bp, synthetic construct
  source 1..15: mol_type = other DNA
ttggacgaggaagct

SEQ ID NO: 7844 - DNA, 15 bp, synthetic construct
  source 1..15: mol_type = other DNA
tctgaaatattctgc

SEQ ID NO: 7845 - DNA, 15 bp, synthetic construct
  source 1..15: mol_type = other DNA
tttactcccaacagg

SEQ ID NO: 7846 - DNA, 15 bp, synthetic construct
  source 1..15: mol_type = other DNA
gccactgctatacca

SEQ ID NO: 7847 - DNA, 15 bp, synthetic construct
  source 1..15: mol_type = other DNA
ctgttccgtggatga

SEQ ID NO: 7848 - DNA, 15 bp, synthetic construct
  source 1..15: mol_type = other DNA
tggcgtagtcgctga

SEQ ID NO: 7849 - DNA, 15 bp, synthetic construct
  source 1..15: mol_type = other DNA
gcaatctgtgctgag

SEQ ID NO: 7850 - DNA, 15 bp, synthetic construct
  source 1..15: mol_type = other DNA
ggtggcaactccaaa

SEQ ID NO: 7851 - DNA, 15 bp, synthetic construct
  source 1..15: mol_type = other DNA
ttccagatgcaaggg

SEQ ID NO: 7852 - DNA, 15 bp, synthetic construct
  source 1..15: mol_type = other DNA
gcctggaaatccact

SEQ ID NO: 7853 - DNA, 15 bp, synthetic construct
  source 1..15: mol_type = other DNA
ctcttgaagggcgta

SEQ ID NO: 7854 - DNA, 15 bp, synthetic construct
  source 1..15: mol_type = other DNA
agaaaaatgggcttt

SEQ ID NO: 7855 - DNA, 15 bp, synthetic construct
  source 1..15: mol_type = other DNA
cagtcttcctcaatt

SEQ ID NO: 7856 - DNA, 15 bp, synthetic construct
  source 1..15: mol_type = other DNA
ggtgagtgtgcattc

SEQ ID NO: 7857 - DNA, 15 bp, synthetic construct
  source 1..15: mol_type = other DNA
tttacatctgcactt

SEQ ID NO: 7858 - DNA, 15 bp, synthetic construct
  source 1..15: mol_type = other DNA
tcagtcacttgggca

SEQ ID NO: 7859 - DNA, 15 bp, synthetic construct
  source 1..15: mol_type = other DNA
gccttccaagttctg

SEQ ID NO: 7860 - DNA, 15 bp, synthetic construct
  source 1..15: mol_type = other DNA
gcttatggcagaatt

SEQ ID NO: 7861 - DNA, 15 bp, synthetic construct
  source 1..15: mol_type = other DNA
ggtcacagtgttcac

SEQ ID NO: 7862 - DNA, 15 bp, synthetic construct
  source 1..15: mol_type = other DNA
cagtctggttcatcc

SEQ ID NO: 7863 - DNA, 15 bp, synthetic construct
  source 1..15: mol_type = other DNA
gaagacaaagccacc

SEQ ID NO: 7864 - DNA, 15 bp, synthetic construct
  source 1..15: mol_type = other DNA
cgtcgcggtagacgt

SEQ ID NO: 7865 - DNA, 15 bp, synthetic construct
  source 1..15: mol_type = other DNA
ggaatgtcacgttct

SEQ ID NO: 7866 - DNA, 15 bp, synthetic construct
  source 1..15: mol_type = other DNA
gcttcccggacatgc

SEQ ID NO: 7867 - DNA, 15 bp, synthetic construct
  source 1..15: mol_type = other DNA
tcggcccgagaactc

SEQ ID NO: 7868 - DNA, 15 bp, synthetic construct
  source 1..15: mol_type = other DNA
tccacgatggcttca

SEQ ID NO: 7869 - DNA, 15 bp, synthetic construct
  source 1..15: mol_type = other DNA
gcgacggtcatcgtc

SEQ ID NO: 7870 - DNA, 15 bp, synthetic construct
  source 1..15: mol_type = other DNA
gccacagcacatgct

SEQ ID NO: 7871 - DNA, 15 bp, synthetic construct
  source 1..15: mol_type = other DNA
agcgcgtagtaggcc

SEQ ID NO: 7872 - DNA, 15 bp, synthetic construct
  source 1..15: mol_type = other DNA
ctgcaacaccttctg

SEQ ID NO: 7873 - DNA, 15 bp, synthetic construct
  source 1..15: mol_type = other DNA
gccagcatgatgtcg

SEQ ID NO: 7874 - DNA, 15 bp, synthetic construct
  source 1..15: mol_type = other DNA
gccgatgaggttgtc

SEQ ID NO: 7875 - DNA, 15 bp, synthetic construct
  source 1..15: mol_type = other DNA
gtggactccgaagaa

SEQ ID NO: 7876 - DNA, 15 bp, synthetic construct
  source 1..15: mol_type = other DNA
ctgcacgacgacttt

SEQ ID NO: 7877 - DNA, 15 bp, synthetic construct
  source 1..15: mol_type = other DNA
ctctcgttgaagaac

SEQ ID NO: 7878 - DNA, 15 bp, synthetic construct
  source 1..15: mol_type = other DNA
tcgaatttgccaatt

SEQ ID NO: 7879 - DNA, 15 bp, synthetic construct
  source 1..15: mol_type = other DNA
gcagttatgaatacc

SEQ ID NO: 7880 - DNA, 15 bp, synthetic construct
  source 1..15: mol_type = other DNA
gccaggccaacaaac

SEQ ID NO: 7881 - DNA, 15 bp, synthetic construct
  source 1..15: mol_type = other DNA
acacagcgcgttccc

SEQ ID NO: 7882 - DNA, 15 bp, synthetic construct
  source 1..15: mol_type = other DNA
cctggatgttgaagc

SEQ ID NO: 7883 - DNA, 15 bp, synthetic construct
  source 1..15: mol_type = other DNA
gcagttgtggatgcc

SEQ ID NO: 7884 - DNA, 15 bp, synthetic construct
  source 1..15: mol_type = other DNA
agcggaaactgccgg

SEQ ID NO: 7885 - DNA, 15 bp, synthetic construct
  source 1..15: mol_type = other DNA
ggatcccagagtatt

SEQ ID NO: 7886 - DNA, 15 bp, synthetic construct
  source 1..15: mol_type = other DNA
tgtactacaacatgg

SEQ ID NO: 7887 - DNA, 15 bp, synthetic construct
  source 1..15: mol_type = other DNA
gtagccaaccatgag

SEQ ID NO: 7888 - DNA, 15 bp, synthetic construct
  source 1..15: mol_type = other DNA
ttgatgcagcggtag

SEQ ID NO: 7889 - DNA, 15 bp, synthetic construct
  source 1..15: mol_type = other DNA
cacggccacagttgg

SEQ ID NO: 7890 - DNA, 15 bp, synthetic construct
  source 1..15: mol_type = other DNA
gctcagcttaataca

SEQ ID NO: 7891 - DNA, 15 bp, synthetic construct
  source 1..15: mol_type = other DNA
ctattgtcctctgtg

SEQ ID NO: 7892 - DNA, 15 bp, synthetic construct
  source 1..15: mol_type = other DNA
tgtgttgatgcatgt

SEQ ID NO: 7893 - DNA, 15 bp, synthetic construct
  source 1..15: mol_type = other DNA
ggcagcggtcattca

SEQ ID NO: 7894 - DNA, 15 bp, synthetic construct
  source 1..15: mol_type = other DNA
atggatgatgcagag

SEQ ID NO: 7895 - DNA, 15 bp, synthetic construct
  source 1..15: mol_type = other DNA
accacctcgtcaccc

SEQ ID NO: 7896 - DNA, 15 bp, synthetic construct
  source 1..15: mol_type = other DNA
cagtaacactggtag

SEQ ID NO: 7897 - DNA, 15 bp, synthetic construct
  source 1..15: mol_type = other DNA
cttcacaggtgactc

SEQ ID NO: 7898 - DNA, 15 bp, synthetic construct
  source 1..15: mol_type = other DNA
ttctttggattccgt

SEQ ID NO: 7899 - DNA, 15 bp, synthetic construct
  source 1..15: mol_type = other DNA
tgccgtcaaaatagt

SEQ ID NO: 7900 - DNA, 15 bp, synthetic construct
  source 1..15: mol_type = other DNA
actgtgttgatgcag

SEQ ID NO: 7901 - DNA, 15 bp, synthetic construct
  source 1..15: mol_type = other DNA
tacagttgcctagag

SEQ ID NO: 7902 - DNA, 15 bp, synthetic construct
  source 1..15: mol_type = other DNA
gaagtggtatatacg

SEQ ID NO: 7903 - DNA, 15 bp, synthetic construct
  source 1..15: mol_type = other DNA
gcactgacaggtgta

SEQ ID NO: 7904 - DNA, 15 bp, synthetic construct
  source 1..15: mol_type = other DNA
gcagcactgcatttt

SEQ ID NO: 7905 - DNA, 15 bp, synthetic construct
  source 1..15: mol_type = other DNA
attgatgttgatctc

SEQ ID NO: 7906 - DNA, 15 bp, synthetic construct
  source 1..15: mol_type = other DNA
ggaggatattctggt

SEQ ID NO: 7907 - DNA, 15 bp, synthetic construct
  source 1..15: mol_type = other DNA
gggctgttcttgcag

SEQ ID NO: 7908 - DNA, 15 bp, synthetic construct
  source 1..15: mol_type = other DNA
aacaaaatccatccc

SEQ ID NO: 7909 - DNA, 15 bp, synthetic construct
  source 1..15: mol_type = other DNA
acacgtgtatgtaaa

SEQ ID NO: 7910 - DNA, 15 bp, synthetic construct
  source 1..15: mol_type = other DNA
gggcaacagtaagca

SEQ ID NO: 7911 - DNA, 15 bp, synthetic construct
  source 1..15: mol_type = other DNA
tccagtaaatccgta

SEQ ID NO: 7912 - DNA, 15 bp, synthetic construct
  source 1..15: mol_type = other DNA
ggagttggaatgcag

SEQ ID NO: 7913 - DNA, 15 bp, synthetic construct
  source 1..15: mol_type = other DNA
cagcagagcgttttt

SEQ ID NO: 7914 - DNA, 15 bp, synthetic construct
  source 1..15: mol_type = other DNA
acactgatttccgcc

SEQ ID NO: 7915 - DNA, 15 bp, synthetic construct
  source 1..15: mol_type = other DNA
tgacgcaacgcccat

SEQ ID NO: 7916 - DNA, 15 bp, synthetic construct
  source 1..15: mol_type = other DNA
agggcatttgcactc

SEQ ID NO: 7917 - DNA, 15 bp, synthetic construct
  source 1..15: mol_type = other DNA
gccaatggtgtttct

SEQ ID NO: 7918 - DNA, 15 bp, synthetic construct
  source 1..15: mol_type = other DNA
atctggtaccatctg

SEQ ID NO: 7919 - DNA, 15 bp, synthetic construct
  source 1..15: mol_type = other DNA
aggtcccacgaaggt

SEQ ID NO: 7920 - DNA, 15 bp, synthetic construct
  source 1..15: mol_type = other DNA
tgtccattgtcacaa

SEQ ID NO: 7921 - DNA, 15 bp, synthetic construct
  source 1..15: mol_type = other DNA
agacagatccttcct

SEQ ID NO: 7922 - DNA, 15 bp, synthetic construct
  source 1..15: mol_type = other DNA
gcgcaacagcattca

SEQ ID NO: 7923 - DNA, 15 bp, synthetic construct
  source 1..15: mol_type = other DNA
aaggcacatgttcct

SEQ ID NO: 7924 - DNA, 15 bp, synthetic construct
  source 1..15: mol_type = other DNA
agctacctccattca

SEQ ID NO: 7925 - DNA, 15 bp, synthetic construct
  source 1..15: mol_type = other DNA
aaaactgccatctgt

SEQ ID NO: 7926 - DNA, 15 bp, synthetic construct
  source 1..15: mol_type = other DNA
ggagtatttctcatg

SEQ ID NO: 7927 - DNA, 15 bp, synthetic construct
  source 1..15: mol_type = other DNA
ggtcaggtaagcttc

SEQ ID NO: 7928 - DNA, 15 bp, synthetic construct
  source 1..15: mol_type = other DNA
aacctgtagtgccct

SEQ ID NO: 7929 - DNA, 15 bp, synthetic construct
  source 1..15: mol_type = other DNA
gcagacacttggtgt

SEQ ID NO: 7930 - DNA, 15 bp, synthetic construct
  source 1..15: mol_type = other DNA
catttgattggtttg

SEQ ID NO: 7931 - DNA, 15 bp, synthetic construct
  source 1..15: mol_type = other DNA
aagttctgcgtcgtg

SEQ ID NO: 7932 - DNA, 15 bp, synthetic construct
  source 1..15: mol_type = other DNA
tcacaggactcgatt

SEQ ID NO: 7933 - DNA, 15 bp, synthetic construct
  source 1..15: mol_type = other DNA
tgagctgcacgtgag

SEQ ID NO: 7934 - DNA, 15 bp, synthetic construct
  source 1..15: mol_type = other DNA
tctcagtgcacgtct

SEQ ID NO: 7935 - DNA, 15 bp, synthetic construct
  source 1..15: mol_type = other DNA
ccactttggtgctgt

SEQ ID NO: 7936 - DNA, 15 bp, synthetic construct
  source 1..15: mol_type = other DNA
gcctatctctcggta

SEQ ID NO: 7937 - DNA, 15 bp, synthetic construct
  source 1..15: mol_type = other DNA
tgtgtccttcaagta

SEQ ID NO: 7938 - DNA, 15 bp, synthetic construct
  source 1..15: mol_type = other DNA
aatcacatctctaca

SEQ ID NO: 7939 - DNA, 15 bp, synthetic construct
  source 1..15: mol_type = other DNA
gcatcaacaccagac

SEQ ID NO: 7940 - DNA, 15 bp, synthetic construct
  source 1..15: mol_type = other DNA
gcgtccatgtggtca

SEQ ID NO: 7941 - DNA, 15 bp, synthetic construct
  source 1..15: mol_type = other DNA
actgagttagccctt

SEQ ID NO: 7942 - DNA, 15 bp, synthetic construct
  source 1..15: mol_type = other DNA
acttatgtgcagaaa

SEQ ID NO: 7943 - DNA, 15 bp, synthetic construct
  source 1..15: mol_type = other DNA
ccgttgctctccttt

SEQ ID NO: 7944 - DNA, 15 bp, synthetic construct
  source 1..15: mol_type = other DNA
atggctgtgccaatt

SEQ ID NO: 7945 - DNA, 15 bp, synthetic construct
  source 1..15: mol_type = other DNA
aactctagcgaggaa

SEQ ID NO: 7946 - DNA, 15 bp, synthetic construct
  source 1..15: mol_type = other DNA
ctgggcggtacctac

SEQ ID NO: 7947 - DNA, 15 bp, synthetic construct
  source 1..15: mol_type = other DNA
agcacctgtagatcc

SEQ ID NO: 7948 - DNA, 15 bp, synthetic construct
  source 1..15: mol_type = other DNA
cagctcggttcagcc

SEQ ID NO: 7949 - DNA, 15 bp, synthetic construct
  source 1..15: mol_type = other DNA
ggtggtctgtttggg

SEQ ID NO: 7950 - DNA, 15 bp, synthetic construct
  source 1..15: mol_type = other DNA
agtgcaaggttacgg

SEQ ID NO: 7951 - DNA, 15 bp, synthetic construct
  source 1..15: mol_type = other DNA
gagcagagttgtcaa

SEQ ID NO: 7952 - DNA, 15 bp, synthetic construct
  source 1..15: mol_type = other DNA
gaaaccagacaggag

SEQ ID NO: 7953 - DNA, 15 bp, synthetic construct
  source 1..15: mol_type = other DNA
tgtgccattgagaaa

SEQ ID NO: 7954 - DNA, 15 bp, synthetic construct
  source 1..15: mol_type = other DNA
ccagcttatccttcc

SEQ ID NO: 7955 - DNA, 15 bp, synthetic construct
  source 1..15: mol_type = other DNA
cctctgcaagagcaa

SEQ ID NO: 7956 - DNA, 15 bp, synthetic construct
  source 1..15: mol_type = other DNA
ttctcatgaccagaa

SEQ ID NO: 7957 - DNA, 15 bp, synthetic construct
  source 1..15: mol_type = other DNA
agttacataccatga

SEQ ID NO: 7958 - DNA, 15 bp, synthetic construct
  source 1..15: mol_type = other DNA
gaagctccaactcag

SEQ ID NO: 7959 - DNA, 15 bp, synthetic construct
  source 1..15: mol_type = other DNA
ccagaggttctcctt

SEQ ID NO: 7960 - DNA, 15 bp, synthetic construct
  source 1..15: mol_type = other DNA
ttgaacttttggatg

SEQ ID NO: 7961 - DNA, 15 bp, synthetic construct
  source 1..15: mol_type = other DNA
ttccagctgtatggg

SEQ ID NO: 7962 - DNA, 15 bp, synthetic construct
  source 1..15: mol_type = other DNA
cctgagcaatggtag

SEQ ID NO: 7963 - DNA, 15 bp, synthetic construct
  source 1..15: mol_type = other DNA
gtatttggtattcag

SEQ ID NO: 7964 - DNA, 15 bp, synthetic construct
  source 1..15: mol_type = other DNA
cgtattgtcacccag

SEQ ID NO: 7965 - DNA, 15 bp, synthetic construct
  source 1..15: mol_type = other DNA
cagtgacagatattc

SEQ ID NO: 7966 - DNA, 15 bp, synthetic construct
  source 1..15: mol_type = other DNA
gcaccagtataaccc

SEQ ID NO: 7967 - DNA, 15 bp, synthetic construct
  source 1..15: mol_type = other DNA
ctaaatgtctgtctt

SEQ ID NO: 7968 - DNA, 15 bp, synthetic construct
  source 1..15: mol_type = other DNA
catgcaagatattga

SEQ ID NO: 7969 - DNA, 15 bp, synthetic construct
  source 1..15: mol_type = other DNA
atggtgaggttagaa

SEQ ID NO: 7970 - DNA, 15 bp, synthetic construct
  source 1..15: mol_type = other DNA
cctgtattcaccact

SEQ ID NO: 7971 - DNA, 15 bp, synthetic construct
  source 1..15: mol_type = other DNA
cctcgtgttacccag

SEQ ID NO: 7972 - DNA, 15 bp, synthetic construct
  source 1..15: mol_type = other DNA
gcacatgtctcacct

SEQ ID NO: 7973 - DNA, 15 bp, synthetic construct
  source 1..15: mol_type = other DNA
gataggaacatatga

SEQ ID NO: 7974 - DNA, 15 bp, synthetic construct
  source 1..15: mol_type = other DNA
acctcccttagacta

SEQ ID NO: 7975 - DNA, 15 bp, synthetic construct
  source 1..15: mol_type = other DNA
tactcccaaaaagcc

SEQ ID NO: 7976 - DNA, 15 bp, synthetic construct
  source 1..15: mol_type = other DNA
gcattaacctctaat

SEQ ID NO: 7977 - DNA, 15 bp, synthetic construct
  source 1..15: mol_type = other DNA
ttgggctagttacag

SEQ ID NO: 7978 - DNA, 15 bp, synthetic construct
  source 1..15: mol_type = other DNA
gcaacttgggacagt

SEQ ID NO: 7979 - DNA, 15 bp, synthetic construct
  source 1..15: mol_type = other DNA
tgagtgatggtgatg

SEQ ID NO: 7980 - DNA, 15 bp, synthetic construct
  source 1..15: mol_type = other DNA
atctcaaaaggtgtt

SEQ ID NO: 7981 - DNA, 15 bp, synthetic construct
  source 1..15: mol_type = other DNA
tcatgatttcctgtt

SEQ ID NO: 7982 - DNA, 15 bp, synthetic construct
  source 1..15: mol_type = other DNA
cccaaaagaatggac

SEQ ID NO: 7983 - DNA, 15 bp, synthetic construct
  source 1..15: mol_type = other DNA
cctgcttgtttgaca

SEQ ID NO: 7984 - DNA, 15 bp, synthetic construct
  source 1..15: mol_type = other DNA
accaggtgcatgtaa

SEQ ID NO: 7985 - DNA, 15 bp, synthetic construct
  source 1..15: mol_type = other DNA
cctgtgtgcttgtgg

SEQ ID NO: 7986 - DNA, 15 bp, synthetic construct
  source 1..15: mol_type = other DNA
gactaagtggctcac

SEQ ID NO: 7987 - DNA, 15 bp, synthetic construct
  source 1..15: mol_type = other DNA
ctgacttctcagtct

SEQ ID NO: 7988 - DNA, 15 bp, synthetic construct
  source 1..15: mol_type = other DNA
cccagtggattcgtg

SEQ ID NO: 7989 - DNA, 15 bp, synthetic construct
  source 1..15: mol_type = other DNA
tgtgagggaacggtt

SEQ ID NO: 7990 - DNA, 15 bp, synthetic construct
  source 1..15: mol_type = other DNA
cctcatttctagccc

SEQ ID NO: 7991 - DNA, 15 bp, synthetic construct
  source 1..15: mol_type = other DNA
tcgtatatcctttac

SEQ ID NO: 7992 - DNA, 15 bp, synthetic construct
  source 1..15: mol_type = other DNA
gagtaccatcaccaa

SEQ ID NO: 7993 - DNA, 15 bp, synthetic construct
  source 1..15: mol_type = other DNA
cccatcccttcgtgg

SEQ ID NO: 7994 - DNA, 15 bp, synthetic construct
  source 1..15: mol_type = other DNA
ccaggcacaccactc

SEQ ID NO: 7995 - DNA, 15 bp, synthetic construct
  source 1..15: mol_type = other DNA
actgacagtgcatgg

SEQ ID NO: 7996 - DNA, 15 bp, synthetic construct
  source 1..15: mol_type = other DNA
tccatagtgagcctt

SEQ ID NO: 7997 - DNA, 15 bp, synthetic construct
  source 1..15: mol_type = other DNA
cactgagatctggta

SEQ ID NO: 7998 - DNA, 15 bp, synthetic construct
  source 1..15: mol_type = other DNA
ggtgtactgtccacc

SEQ ID NO: 7999 - DNA, 15 bp, synthetic construct
  source 1..15: mol_type = other DNA
ccgtcttgacggttc

SEQ ID NO: 8000 - DNA, 15 bp, synthetic construct
  source 1..15: mol_type = other DNA
aggccacagtaattc

SEQ ID NO: 8001 - DNA, 15 bp, synthetic construct
  source 1..15: mol_type = other DNA
ttttacttgcttctg

SEQ ID NO: 8002 - DNA, 15 bp, synthetic construct
  source 1..15: mol_type = other DNA
gaagggaacaggaaa

SEQ ID NO: 8003 - DNA, 15 bp, synthetic construct
  source 1..15: mol_type = other DNA
ttgacagaactgtca

SEQ ID NO: 8004 - DNA, 15 bp, synthetic construct
  source 1..15: mol_type = other DNA
gaacgaagcacacga

SEQ ID NO: 8005 - DNA, 15 bp, synthetic construct
  source 1..15: mol_type = other DNA
acgagcccgatagcc

SEQ ID NO: 8006 - DNA, 15 bp, synthetic construct
  source 1..15: mol_type = other DNA
ttggattggctgcat

SEQ ID NO: 8007 - DNA, 15 bp, synthetic construct
  source 1..15: mol_type = other DNA
cctgttgtagcaaag

SEQ ID NO: 8008 - DNA, 15 bp, synthetic construct
  source 1..15: mol_type = other DNA
gggtcgatgaccacg

SEQ ID NO: 8009 - DNA, 15 bp, synthetic construct
  source 1..15: mol_type = other DNA
acgtgctgaagaaca

SEQ ID NO: 8010 - DNA, 15 bp, synthetic construct
  source 1..15: mol_type = other DNA
catccctgttggaat

SEQ ID NO: 8011 - DNA, 15 bp, synthetic construct
  source 1..15: mol_type = other DNA
tgtcgttgacacctt

SEQ ID NO: 8012 - DNA, 15 bp, synthetic construct
  source 1..15: mol_type = other DNA
aggtctgggaaacag

SEQ ID NO: 8013 - DNA, 15 bp, synthetic construct
  source 1..15: mol_type = other DNA
gagggcattaccggc

SEQ ID NO: 8014 - DNA, 15 bp, synthetic construct
  source 1..15: mol_type = other DNA
tcagagtctaagcta

SEQ ID NO: 8015 - DNA, 15 bp, synthetic construct
  source 1..15: mol_type = other DNA
ttatatggatcccat

SEQ ID NO: 8016 - DNA, 15 bp, synthetic construct
  source 1..15: mol_type = other DNA
actttcttttgagtg

SEQ ID NO: 8017 - DNA, 15 bp, synthetic construct
  source 1..15: mol_type = other DNA
tggaagctccaagaa

SEQ ID NO: 8018 - DNA, 15 bp, synthetic construct
  source 1..15: mol_type = other DNA
gcgacttggagtgaa

SEQ ID NO: 8019 - DNA, 15 bp, synthetic construct
  source 1..15: mol_type = other DNA
tgccgttgatgacga

SEQ ID NO: 8020 - DNA, 15 bp, synthetic construct
  source 1..15: mol_type = other DNA
ggtccatgccaaagg

SEQ ID NO: 8021 - DNA, 15 bp, synthetic construct
  source 1..15: mol_type = other DNA
acgcctcgtaccagg

SEQ ID NO: 8022 - DNA, 15 bp, synthetic construct
  source 1..15: mol_type = other DNA
catgctatcaaggtc

SEQ ID NO: 8023 - DNA, 15 bp, synthetic construct
  source 1..15: mol_type = other DNA
caaggtgagattctg

SEQ ID NO: 8024 - DNA, 15 bp, synthetic construct
  source 1..15: mol_type = other DNA
ctctggtgtgtgtac

SEQ ID NO: 8025 - DNA, 15 bp, synthetic construct
  source 1..15: mol_type = other DNA
atatcagagtcctta

SEQ ID NO: 8026 - DNA, 15 bp, synthetic construct
  source 1..15: mol_type = other DNA
agccgagcagaaccc

SEQ ID NO: 8027 - DNA, 15 bp, synthetic construct
  source 1..15: mol_type = other DNA
atctagcaggtagtt

SEQ ID NO: 8028 - DNA, 15 bp, synthetic construct
  source 1..15: mol_type = other DNA
agcccgacgcgtaca

SEQ ID NO: 8029 - DNA, 15 bp, synthetic construct
  source 1..15: mol_type = other DNA
ctcctgttttcggca

SEQ ID NO: 8030 - DNA, 15 bp, synthetic construct
  source 1..15: mol_type = other DNA
aggtgagattctgca

SEQ ID NO: 8031 - DNA, 15 bp, synthetic construct
  source 1..15: mol_type = other DNA
agcaatcttcatcac

SEQ ID NO: 8032 - DNA, 15 bp, synthetic construct
  source 1..15: mol_type = other DNA
gttcttgtgtcggcc

SEQ ID NO: 8033 - DNA, 15 bp, synthetic construct
  source 1..15: mol_type = other DNA
tggtcactgccactc

SEQ ID NO: 8034 - DNA, 15 bp, synthetic construct
  source 1..15: mol_type = other DNA
gccaaacccgggatg

SEQ ID NO: 8035 - DNA, 15 bp, synthetic construct
  source 1..15: mol_type = other DNA
gacttgcacataggg

SEQ ID NO: 8036 - DNA, 15 bp, synthetic construct
  source 1..15: mol_type = other DNA
ccatcacgagactcc

SEQ ID NO: 8037 - DNA, 15 bp, synthetic construct
  source 1..15: mol_type = other DNA
agaactgcaaagtgg

SEQ ID NO: 8038 - DNA, 15 bp, synthetic construct
  source 1..15: mol_type = other DNA
acttgacggtgttcc

SEQ ID NO: 8039 - DNA, 15 bp, synthetic construct
  source 1..15: mol_type = other DNA
ccaatgcggttctcc

SEQ ID NO: 8040 - DNA, 15 bp, synthetic construct
  source 1..15: mol_type = other DNA
aactcccatagtggg

SEQ ID NO: 8041 - DNA, 15 bp, synthetic construct
  source 1..15: mol_type = other DNA
gaagtccgctgaccg

SEQ ID NO: 8042 - DNA, 15 bp, synthetic construct
  source 1..15: mol_type = other DNA
tctctgcaatttatc

SEQ ID NO: 8043 - DNA, 15 bp, synthetic construct
  source 1..15: mol_type = other DNA
ttcctcatcttcact

SEQ ID NO: 8044 - DNA, 15 bp, synthetic construct
  source 1..15: mol_type = other DNA
tgtgccgtccatccg

SEQ ID NO: 8045 - DNA, 15 bp, synthetic construct
  source 1..15: mol_type = other DNA
acctggcccaaacac

SEQ ID NO: 8046 - DNA, 15 bp, synthetic construct
  source 1..15: mol_type = other DNA
tttgccgtcttgcca

SEQ ID NO: 8047 - DNA, 15 bp, synthetic construct
  source 1..15: mol_type = other DNA
agcggccgagagtca

SEQ ID NO: 8048 - DNA, 15 bp, synthetic construct
  source 1..15: mol_type = other DNA
gggagcttttccagc

SEQ ID NO: 8049 - DNA, 15 bp, synthetic construct
  source 1..15: mol_type = other DNA
cgccaccatacttca

SEQ ID NO: 8050 - DNA, 15 bp, synthetic construct
  source 1..15: mol_type = other DNA
cgggtgaatgatttc

SEQ ID NO: 8051 - DNA, 15 bp, synthetic construct
  source 1..15: mol_type = other DNA
cctcaacaaacacca

SEQ ID NO: 8052 - DNA, 15 bp, synthetic construct
  source 1..15: mol_type = other DNA
ctcgtgcattatcca

SEQ ID NO: 8053 - DNA, 15 bp, synthetic construct
  source 1..15: mol_type = other DNA
tcccggatacggacg

SEQ ID NO: 8054 - DNA, 15 bp, synthetic construct
  source 1..15: mol_type = other DNA
tgggcttgttggtaa

SEQ ID NO: 8055 - DNA, 15 bp, synthetic construct
  source 1..15: mol_type = other DNA
aagggtcaactttga

SEQ ID NO: 8056 - DNA, 15 bp, synthetic construct
  source 1..15: mol_type = other DNA
aggccatgtacgggc

SEQ ID NO: 8057 - DNA, 15 bp, synthetic construct
  source 1..15: mol_type = other DNA
ggatgggatcgccac

SEQ ID NO: 8058 - DNA, 15 bp, synthetic construct
  source 1..15: mol_type = other DNA
gagtatgtcttgttc

SEQ ID NO: 8059 - DNA, 15 bp, synthetic construct
  source 1..15: mol_type = other DNA
ttgggtgggtgtata

SEQ ID NO: 8060 - DNA, 15 bp, synthetic construct
  source 1..15: mol_type = other DNA
ggaccgtatgcagaa

SEQ ID NO: 8061 - DNA, 15 bp, synthetic construct
  source 1..15: mol_type = other DNA
tcgatacacctggtt

SEQ ID NO: 8062 - DNA, 15 bp, synthetic construct
  source 1..15: mol_type = other DNA
gtccatcgtaggtca

SEQ ID NO: 8063 - DNA, 15 bp, synthetic construct
  source 1..15: mol_type = other DNA
tcacttcaaatgggc

SEQ ID NO: 8064 - DNA, 15 bp, synthetic construct
  source 1..15: mol_type = other DNA
cgaatgcgtagaccc

SEQ ID NO: 8065 - DNA, 15 bp, synthetic construct
  source 1..15: mol_type = other DNA
ggctctccatttgag

SEQ ID NO: 8066 - DNA, 15 bp, synthetic construct
  source 1..15: mol_type = other DNA
ccaggcaagtacaat

SEQ ID NO: 8067 - DNA, 15 bp, synthetic construct
  source 1..15: mol_type = other DNA
ctccaattctatagg

SEQ ID NO: 8068 - DNA, 15 bp, synthetic construct
  source 1..15: mol_type = other DNA
ccattggaatttcct

SEQ ID NO: 8069 - DNA, 15 bp, synthetic construct
  source 1..15: mol_type = other DNA
gtgaagtagacagga

SEQ ID NO: 8070 - DNA, 15 bp, synthetic construct
  source 1..15: mol_type = other DNA
tgccagtggtttctt

SEQ ID NO: 8071 - DNA, 15 bp, synthetic construct
  source 1..15: mol_type = other DNA
ggatggtgtagacgt

SEQ ID NO: 8072 - DNA, 15 bp, synthetic construct
  source 1..15: mol_type = other DNA
ggccatagcagtagc

SEQ ID NO: 8073 - DNA, 15 bp, synthetic construct
  source 1..15: mol_type = other DNA
tcggtaagtgttccc

SEQ ID NO: 8074 - DNA, 15 bp, synthetic construct
  source 1..15: mol_type = other DNA
tgactcggagtctca

SEQ ID NO: 8075 - DNA, 15 bp, synthetic construct
  source 1..15: mol_type = other DNA
tggttgccctttatg

SEQ ID NO: 8076 - DNA, 15 bp, synthetic construct
  source 1..15: mol_type = other DNA
ctgcggttggtaaac

SEQ ID NO: 8077 - DNA, 15 bp, synthetic construct
  source 1..15: mol_type = other DNA
acacacactctaaca

SEQ ID NO: 8078 - DNA, 15 bp, synthetic construct
  source 1..15: mol_type = other DNA
caattcttggagcag

SEQ ID NO: 8079 - DNA, 15 bp, synthetic construct
  source 1..15: mol_type = other DNA
tgcctccagatgcaa

SEQ ID NO: 8080 - DNA, 15 bp, synthetic construct
  source 1..15: mol_type = other DNA
ccgggactcaggtta

SEQ ID NO: 8081 - DNA, 15 bp, synthetic construct
  source 1..15: mol_type = other DNA
taggagtttaagtgg

SEQ ID NO: 8082 - DNA, 15 bp, synthetic construct
  source 1..15: mol_type = other DNA
tgaccgaagcatgta

SEQ ID NO: 8083 - DNA, 15 bp, synthetic construct
  source 1..15: mol_type = other DNA
cacggtagccggtca

SEQ ID NO: 8084 - DNA, 15 bp, synthetic construct
  source 1..15: mol_type = other DNA
tttactctcgcagtt

SEQ ID NO: 8085 - DNA, 15 bp, synthetic construct
  source 1..15: mol_type = other DNA
ctccagcgaacaaca

SEQ ID NO: 8086 - DNA, 15 bp, synthetic construct
  source 1..15: mol_type = other DNA
aagtacaaaccaacg

SEQ ID NO: 8087 - DNA, 15 bp, synthetic construct
  source 1..15: mol_type = other DNA
acacgtgcacctcat

SEQ ID NO: 8088 - DNA, 15 bp, synthetic construct
  source 1..15: mol_type = other DNA
ctactggctgtgatt

SEQ ID NO: 8089 - DNA, 15 bp, synthetic construct
  source 1..15: mol_type = other DNA
gtgtctgcgtagtag

SEQ ID NO: 8090 - DNA, 15 bp, synthetic construct
  source 1..15: mol_type = other DNA
taaggcgagtattgc

SEQ ID NO: 8091 - DNA, 15 bp, synthetic construct
  source 1..15: mol_type = other DNA
gagcgtgccaccttg

SEQ ID NO: 8092 - DNA, 15 bp, synthetic construct
  source 1..15: mol_type = other DNA
aggcctgagttcatg

SEQ ID NO: 8093 - DNA, 15 bp, synthetic construct
  source 1..15: mol_type = other DNA
cttccatcttcacag

SEQ ID NO: 8094 - DNA, 15 bp, synthetic construct
  source 1..15: mol_type = other DNA
atgaaacccgtctgg

SEQ ID NO: 8095 - DNA, 15 bp, synthetic construct
  source 1..15: mol_type = other DNA
ttggacacaacttaa

SEQ ID NO: 8096 - DNA, 15 bp, synthetic construct
  source 1..15: mol_type = other DNA
ctgtaaactcgtagg

SEQ ID NO: 8097 - DNA, 15 bp, synthetic construct
  source 1..15: mol_type = other DNA
tgagggcaattcctg

SEQ ID NO: 8098 - DNA, 15 bp, synthetic construct
  source 1..15: mol_type = other DNA
gagcctctagtgtat

SEQ ID NO: 8099 - DNA, 15 bp, synthetic construct
  source 1..15: mol_type = other DNA
ttcggtcaagcaact

SEQ ID NO: 8100 - DNA, 15 bp, synthetic construct
  source 1..15: mol_type = other DNA
cccgggttggcatag

SEQ ID NO: 8101 - DNA, 15 bp, synthetic construct
  source 1..15: mol_type = other DNA
gggtcatgttgccgc

SEQ ID NO: 8102 - DNA, 15 bp, synthetic construct
  source 1..15: mol_type = other DNA
agtcttttgcactgg

SEQ ID NO: 8103 - DNA, 15 bp, synthetic construct
  source 1..15: mol_type = other DNA
atgctgttgacggtt

SEQ ID NO: 8104 - DNA, 15 bp, synthetic construct
  source 1..15: mol_type = other DNA
ttttctctcttgcta

SEQ ID NO: 8105 - DNA, 15 bp, synthetic construct
  source 1..15: mol_type = other DNA
tctggaatacacacc

SEQ ID NO: 8106 - DNA, 15 bp, synthetic construct
  source 1..15: mol_type = other DNA
cggaggatgtctaca

SEQ ID NO: 8107 - DNA, 15 bp, synthetic construct
  source 1..15: mol_type = other DNA
aagcacacgatggca

SEQ ID NO: 8108 - DNA, 15 bp, synthetic construct
  source 1..15: mol_type = other DNA
actgtggaaagtgca

SEQ ID NO: 8109 - DNA, 15 bp, synthetic construct
  source 1..15: mol_type = other DNA
ggaaacacagaaggc

SEQ ID NO: 8110 - DNA, 15 bp, synthetic construct
  source 1..15: mol_type = other DNA
tatgtgacctcagaa

SEQ ID NO: 8111 - DNA, 15 bp, synthetic construct
  source 1..15: mol_type = other DNA
accacgttttgaaat

SEQ ID NO: 8112 - DNA, 15 bp, synthetic construct
  source 1..15: mol_type = other DNA
tcttgttgtagaagg

SEQ ID NO: 8113 - DNA, 15 bp, synthetic construct
  source 1..15: mol_type = other DNA
gggatgcatcgcaca

SEQ ID NO: 8114 - DNA, 15 bp, synthetic construct
  source 1..15: mol_type = other DNA
ttgtttctcttggaa

SEQ ID NO: 8115 - DNA, 15 bp, synthetic construct
  source 1..15: mol_type = other DNA
ggcagtggagagatt

SEQ ID NO: 8116 - DNA, 15 bp, synthetic construct
  source 1..15: mol_type = other DNA
actgttgtagaagtg

SEQ ID NO: 8117 - DNA, 15 bp, synthetic construct
  source 1..15: mol_type = other DNA
ccttccttgagtggt

SEQ ID NO: 8118 - DNA, 15 bp, synthetic construct
  source 1..15: mol_type = other DNA
cagaataaggacttg

SEQ ID NO: 8119 - DNA, 15 bp, synthetic construct
  source 1..15: mol_type = other DNA
aatagtaagtgtggc

SEQ ID NO: 8120 - DNA, 15 bp, synthetic construct
  source 1..15: mol_type = other DNA
tgggtggaagaagtt

SEQ ID NO: 8121 - DNA, 15 bp, synthetic construct
  source 1..15: mol_type = other DNA
ccgctcacataggct

SEQ ID NO: 8122 - DNA, 15 bp, synthetic construct
  source 1..15: mol_type = other DNA
ttcacactgaccttc

SEQ ID NO: 8123 - DNA, 15 bp, synthetic construct
  source 1..15: mol_type = other DNA
ccttgaggccattgt

SEQ ID NO: 8124 - DNA, 15 bp, synthetic construct
  source 1..15: mol_type = other DNA
caaaaacaaggagaa

SEQ ID NO: 8125 - DNA, 15 bp, synthetic construct
  source 1..15: mol_type = other DNA
cctgcttatgtctgg

SEQ ID NO: 8126 - DNA, 15 bp, synthetic construct
  source 1..15: mol_type = other DNA
gctgtgctagaggaa

SEQ ID NO: 8127 - DNA, 15 bp, synthetic construct
  source 1..15: mol_type = other DNA
caccgggagactgct

SEQ ID NO: 8128 - DNA, 15 bp, synthetic construct
  source 1..15: mol_type = other DNA
ggctaaaaaaaagga

SEQ ID NO: 8129 - DNA, 15 bp, synthetic construct
  source 1..15: mol_type = other DNA
ctcatctgttcaatg

SEQ ID NO: 8130 - DNA, 15 bp, synthetic construct
  source 1..15: mol_type = other DNA
ggcctatgtgtgata

SEQ ID NO: 8131 - DNA, 15 bp, synthetic construct
  source 1..15: mol_type = other DNA
tctcactgatccctg

SEQ ID NO: 8132 - DNA, 15 bp, synthetic construct
  source 1..15: mol_type = other DNA
tcaggagctgttctg

SEQ ID NO: 8133 - DNA, 15 bp, synthetic construct
  source 1..15: mol_type = other DNA
ttctagaaagagggt

SEQ ID NO: 8134 - DNA, 15 bp, synthetic construct
  source 1..15: mol_type = other DNA
ccttttcctgcggaa

SEQ ID NO: 8135 - DNA, 15 bp, synthetic construct
  source 1..15: mol_type = other DNA
gagaaggagttgaag

SEQ ID NO: 8136 - DNA, 15 bp, synthetic construct
  source 1..15: mol_type = other DNA
gaggcttcacgtgcg

SEQ ID NO: 8137 - DNA, 15 bp, synthetic construct
  source 1..15: mol_type = other DNA
agacgcggagcaatg

SEQ ID NO: 8138 - DNA, 15 bp, synthetic construct
  source 1..15: mol_type = other DNA
gaagtagcagaagtt

SEQ ID NO: 8139 - DNA, 15 bp, synthetic construct
  source 1..15: mol_type = other DNA
gtcatctaattagca

SEQ ID NO: 8140 - DNA, 15 bp, synthetic construct
  source 1..15: mol_type = other DNA
gctacagctacactc

SEQ ID NO: 8141 - DNA, 15 bp, synthetic construct
  source 1..15: mol_type = other DNA
ctctcatggtgcagg

SEQ ID NO: 8142 - DNA, 15 bp, synthetic construct
  source 1..15: mol_type = other DNA
tggcctcccagtcaa

SEQ ID NO: 8143 - DNA, 15 bp, synthetic construct
  source 1..15: mol_type = other DNA
agtcgggcttaaaga

SEQ ID NO: 8144 - DNA, 15 bp, synthetic construct
  source 1..15: mol_type = other DNA
gtcgccgcttcttga

SEQ ID NO: 8145 - DNA, 15 bp, synthetic construct
  source 1..15: mol_type = other DNA
ccgaggcactttgat

SEQ ID NO: 8146 - DNA, 15 bp, synthetic construct
  source 1..15: mol_type = other DNA
tgtaccatctctctc

SEQ ID NO: 8147 - DNA, 15 bp, synthetic construct
  source 1..15: mol_type = other DNA
caggtgaattctaac

SEQ ID NO: 8148 - DNA, 15 bp, synthetic construct
  source 1..15: mol_type = other DNA
tgcttgtgtgtgatt

SEQ ID NO: 8149 - DNA, 15 bp, synthetic construct
  source 1..15: mol_type = other DNA
tcgcatgttgtggaa

SEQ ID NO: 8150 - DNA, 15 bp, synthetic construct
  source 1..15: mol_type = other DNA
acaaagcacttgtgc

SEQ ID NO: 8151 - DNA, 15 bp, synthetic construct
  source 1..15: mol_type = other DNA
atgagtagttcctct

SEQ ID NO: 8152 - DNA, 15 bp, synthetic construct
  source 1..15: mol_type = other DNA
gctacgatgcagcag

SEQ ID NO: 8153 - DNA, 15 bp, synthetic construct
  source 1..15: mol_type = other DNA
tttcttgcggaactc

SEQ ID NO: 8154 - DNA, 15 bp, synthetic construct
  source 1..15: mol_type = other DNA
tttgaggttgtttga

SEQ ID NO: 8155 - DNA, 15 bp, synthetic construct
  source 1..15: mol_type = other DNA
ggcaggatggtttct

SEQ ID NO: 8156 - DNA, 15 bp, synthetic construct
  source 1..15: mol_type = other DNA
tttgtgttgagtgag

SEQ ID NO: 8157 - DNA, 15 bp, synthetic construct
  source 1..15: mol_type = other DNA
gtgtctgcacgggac

SEQ ID NO: 8158 - DNA, 15 bp, synthetic construct
  source 1..15: mol_type = other DNA
ccagtggtagatctc

SEQ ID NO: 8159 - DNA, 15 bp, synthetic construct
  source 1..15: mol_type = other DNA
agactcaggttgtgg

SEQ ID NO: 8160 - DNA, 15 bp, synthetic construct
  source 1..15: mol_type = other DNA
agccctgaagtaatc

SEQ ID NO: 8161 - DNA, 15 bp, synthetic construct
  source 1..15: mol_type = other DNA
ggctcttcgaagacc

SEQ ID NO: 8162 - DNA, 15 bp, synthetic construct
  source 1..15: mol_type = other DNA
caagacagtggaaac

SEQ ID NO: 8163 - DNA, 15 bp, synthetic construct
  source 1..15: mol_type = other DNA
cgcgtagcgcttacg

SEQ ID NO: 8164 - DNA, 15 bp, synthetic construct
  source 1..15: mol_type = other DNA
cggatcgagttgcag

SEQ ID NO: 8165 - DNA, 15 bp, synthetic construct
  source 1..15: mol_type = other DNA
tgatgttgtaggcgc

SEQ ID NO: 8166 - DNA, 15 bp, synthetic construct
  source 1..15: mol_type = other DNA
tcacgccactcgatg

SEQ ID NO: 8167 - DNA, 15 bp, synthetic construct
  source 1..15: mol_type = other DNA
caccacccaaaaaaa

SEQ ID NO: 8168 - DNA, 15 bp, synthetic construct
  source 1..15: mol_type = other DNA
gccagatcactcgct

SEQ ID NO: 8169 - DNA, 15 bp, synthetic construct
  source 1..15: mol_type = other DNA
ccgtgtgggtacgga

SEQ ID NO: 8170 - DNA, 15 bp, synthetic construct
  source 1..15: mol_type = other DNA
accgttttctctggg

SEQ ID NO: 8171 - DNA, 15 bp, synthetic construct
  source 1..15: mol_type = other DNA
gtcattttctgcttc

SEQ ID NO: 8172 - DNA, 15 bp, synthetic construct
  source 1..15: mol_type = other DNA
acggtttccgccgag

SEQ ID NO: 8173 - DNA, 15 bp, synthetic construct
  source 1..15: mol_type = other DNA
atttccagtttgaag

SEQ ID NO: 8174 - DNA, 15 bp, synthetic construct
  source 1..15: mol_type = other DNA
agccgcttccagaga

SEQ ID NO: 8175 - DNA, 15 bp, synthetic construct
  source 1..15: mol_type = other DNA
aaaagaccaagacac

SEQ ID NO: 8176 - DNA, 15 bp, synthetic construct
  source 1..15: mol_type = other DNA
ggcaaaagattccag

SEQ ID NO: 8177 - DNA, 15 bp, synthetic construct
  source 1..15: mol_type = other DNA
gtctgacagttcgca

SEQ ID NO: 8178 - DNA, 15 bp, synthetic construct
  source 1..15: mol_type = other DNA
tgcattctttctgaa

SEQ ID NO: 8179 - DNA, 15 bp, synthetic construct
  source 1..15: mol_type = other DNA
ggcgacgactctgca

SEQ ID NO: 8180 - DNA, 15 bp, synthetic construct
  source 1..15: mol_type = other DNA
tctgaaaccctcaac

SEQ ID NO: 8181 - DNA, 15 bp, synthetic construct
  source 1..15: mol_type = other DNA
ccattggcattcctc

SEQ ID NO: 8182 - DNA, 15 bp, synthetic construct
  source 1..15: mol_type = other DNA
ggccctgaccgagtt

SEQ ID NO: 8183 - DNA, 15 bp, synthetic construct
  source 1..15: mol_type = other DNA
aaatgacaggcagag

SEQ ID NO: 8184 - DNA, 15 bp, synthetic construct
  source 1..15: mol_type = other DNA
tggaaaagaaacaag

SEQ ID NO: 8185 - DNA, 15 bp, synthetic construct
  source 1..15: mol_type = other DNA
tttcctgactcgccc

SEQ ID NO: 8186 - DNA, 15 bp, synthetic construct
  source 1..15: mol_type = other DNA
ctggtacttgaggca

SEQ ID NO: 8187 - DNA, 15 bp, synthetic construct
  source 1..15: mol_type = other DNA
ggcgtacgacctgct

SEQ ID NO: 8188 - DNA, 15 bp, synthetic construct
  source 1..15: mol_type = other DNA
ccttcatgccttaca

SEQ ID NO: 8189 - DNA, 15 bp, synthetic construct
  source 1..15: mol_type = other DNA
tgggtacggcagaat

SEQ ID NO: 8190 - DNA, 15 bp, synthetic construct
  source 1..15: mol_type = other DNA
tcccggcgtttctcc

SEQ ID NO: 8191 - DNA, 15 bp, synthetic construct
  source 1..15: mol_type = other DNA
caacagactgtatta

SEQ ID NO: 8192 - DNA, 15 bp, synthetic construct
  source 1..15: mol_type = other DNA
tgctcctgcaaaaat

SEQ ID NO: 8193 - DNA, 15 bp, synthetic construct
  source 1..15: mol_type = other DNA
cgtggttgccttgac

SEQ ID NO: 8194 - DNA, 15 bp, synthetic construct
  source 1..15: mol_type = other DNA
gccagggtagggatc

SEQ ID NO: 8195 - DNA, 15 bp, synthetic construct
  source 1..15: mol_type = other DNA
ctgattgcccagaac

SEQ ID NO: 8196 - DNA, 15 bp, synthetic construct
  source 1..15: mol_type = other DNA
ggacaagacagatgc

SEQ ID NO: 8197 - DNA, 15 bp, synthetic construct
  source 1..15: mol_type = other DNA
gacgtcttggagaag

SEQ ID NO: 8198 - DNA, 15 bp, synthetic construct
  source 1..15: mol_type = other DNA
ggaagcaaaggtgag

SEQ ID NO: 8199 - DNA, 15 bp, synthetic construct
  source 1..15: mol_type = other DNA
cagattcagtggttg

SEQ ID NO: 8200 - DNA, 15 bp, synthetic construct
  source 1..15: mol_type = other DNA
gaaaggaaacaaaac

SEQ ID NO: 8201 - DNA, 15 bp, synthetic construct
  source 1..15: mol_type = other DNA
catgggagcctcgat

SEQ ID NO: 8202 - DNA, 15 bp, synthetic construct
  source 1..15: mol_type = other DNA
acgaagaccatctcg

SEQ ID NO: 8203 - DNA, 15 bp, synthetic construct
  source 1..15: mol_type = other DNA
cgtctgggatgattg

SEQ ID NO: 8204 - DNA, 15 bp, synthetic construct
  source 1..15: mol_type = other DNA
aggataggctacaaa

SEQ ID NO: 8205 - DNA, 15 bp, synthetic construct
  source 1..15: mol_type = other DNA
gcttctctgtgcaaa

SEQ ID NO: 8206 - DNA, 15 bp, synthetic construct
  source 1..15: mol_type = other DNA
agcaagatgcctacg

SEQ ID NO: 8207 - DNA, 15 bp, synthetic construct
  source 1..15: mol_type = other DNA
ctatcaggatgtctc

SEQ ID NO: 8208 - DNA, 15 bp, synthetic construct
  source 1..15: mol_type = other DNA
tgtgcccatgcggat

SEQ ID NO: 8209 - DNA, 15 bp, synthetic construct
  source 1..15: mol_type = other DNA
ttactaagaggagcc

SEQ ID NO: 8210 - DNA, 15 bp, synthetic construct
  source 1..15: mol_type = other DNA
tgacctgtacgctcg

SEQ ID NO: 8211 - DNA, 15 bp, synthetic construct
  source 1..15: mol_type = other DNA
tccacttggcgccac

SEQ ID NO: 8212 - DNA, 15 bp, synthetic construct
  source 1..15: mol_type = other DNA
agagatgaggtcagt

SEQ ID NO: 8213 - DNA, 15 bp, synthetic construct
  source 1..15: mol_type = other DNA
taccaggtccaatga

SEQ ID NO: 8214 - DNA, 15 bp, synthetic construct
  source 1..15: mol_type = other DNA
gccaaggtcaggatt

SEQ ID NO: 8215 - DNA, 15 bp, synthetic construct
  source 1..15: mol_type = other DNA
caatttgtgtctgtc

SEQ ID NO: 8216 - DNA, 15 bp, synthetic construct
  source 1..15: mol_type = other DNA
caacggcggtagtac

SEQ ID NO: 8217 - DNA, 15 bp, synthetic construct
  source 1..15: mol_type = other DNA
ttctttggcacttca

SEQ ID NO: 8218 - DNA, 15 bp, synthetic construct
  source 1..15: mol_type = other DNA
tggctcaaactcagt

SEQ ID NO: 8219 - DNA, 15 bp, synthetic construct
  source 1..15: mol_type = other DNA
gacctagtgaagtga

SEQ ID NO: 8220 - DNA, 15 bp, synthetic construct
  source 1..15: mol_type = other DNA
tcctgctctgttaaa

SEQ ID NO: 8221 - DNA, 15 bp, synthetic construct
  source 1..15: mol_type = other DNA
ggttataaagctcat

SEQ ID NO: 8222 - DNA, 15 bp, synthetic construct
  source 1..15: mol_type = other DNA
tgacatggtcggtca

SEQ ID NO: 8223 - DNA, 15 bp, synthetic construct
  source 1..15: mol_type = other DNA
agaaagactttccta

SEQ ID NO: 8224 - DNA, 15 bp, synthetic construct
  source 1..15: mol_type = other DNA
tccttcacgtctcag

SEQ ID NO: 8225 - DNA, 15 bp, synthetic construct
  source 1..15: mol_type = other DNA
ggccaacagctcttg

SEQ ID NO: 8226 - DNA, 15 bp, synthetic construct
  source 1..15: mol_type = other DNA
ggtgctaagtgaagg

SEQ ID NO: 8227 - DNA, 15 bp, synthetic construct
  source 1..15: mol_type = other DNA
gcaaaggtcttcgtg

SEQ ID NO: 8228 - DNA, 15 bp, synthetic construct
  source 1..15: mol_type = other DNA
ggtttgggttctctt

SEQ ID NO: 8229 - DNA, 15 bp, synthetic construct
  source 1..15: mol_type = other DNA
cactgatgaaagtcc

SEQ ID NO: 8230 - DNA, 15 bp, synthetic construct
  source 1..15: mol_type = other DNA
ctgctcaccttagca

SEQ ID NO: 8231 - DNA, 15 bp, synthetic construct
  source 1..15: mol_type = other DNA
tttcacaatgggctc

SEQ ID NO: 8232 - DNA, 15 bp, synthetic construct
  source 1..15: mol_type = other DNA
cccgaggaaacgcag

SEQ ID NO: 8233 - DNA, 15 bp, synthetic construct
  source 1..15: mol_type = other DNA
gccatcgtgacctcc

SEQ ID NO: 8234 - DNA, 15 bp, synthetic construct
  source 1..15: mol_type = other DNA
ttttggactatcgtc

SEQ ID NO: 8235 - DNA, 15 bp, synthetic construct
  source 1..15: mol_type = other DNA
gtcgtagtactcagg

SEQ ID NO: 8236 - DNA, 15 bp, synthetic construct
  source 1..15: mol_type = other DNA
ctcacagatctgctg

SEQ ID NO: 8237 - DNA, 15 bp, synthetic construct
  source 1..15: mol_type = other DNA
acacacgacagacat

SEQ ID NO: 8238 - DNA, 15 bp, synthetic construct
  source 1..15: mol_type = other DNA
gatacctcctcatga

SEQ ID NO: 8239 - DNA, 15 bp, synthetic construct
  source 1..15: mol_type = other DNA
ggcacgggcaggatt

SEQ ID NO: 8240 - DNA, 15 bp, synthetic construct
  source 1..15: mol_type = other DNA
ctgccttgaacacag

SEQ ID NO: 8241 - DNA, 15 bp, synthetic construct
  source 1..15: mol_type = other DNA
agctgcggctaaaat

SEQ ID NO: 8242 - DNA, 15 bp, synthetic construct
  source 1..15: mol_type = other DNA
cgctgagatgccttt

SEQ ID NO: 8243 - DNA, 15 bp, synthetic construct
  source 1..15: mol_type = other DNA
tggagagtggattct

SEQ ID NO: 8244 - DNA, 15 bp, synthetic construct
  source 1..15: mol_type = other DNA
gggatgaggtctcgt

SEQ ID NO: 8245 - DNA, 15 bp, synthetic construct
  source 1..15: mol_type = other DNA
tgaccagcaaccggg

SEQ ID NO: 8246 - DNA, 15 bp, synthetic construct
  source 1..15: mol_type = other DNA
caaagctttaggcga

SEQ ID NO: 8247 - DNA, 15 bp, synthetic construct
  source 1..15: mol_type = other DNA
tcatgcattctcgtc

SEQ ID NO: 8248 - DNA, 15 bp, synthetic construct
  source 1..15: mol_type = other DNA
ctccacactgacggg

SEQ ID NO: 8249 - DNA, 15 bp, synthetic construct
  source 1..15: mol_type = other DNA
cgcagtttcctcttg

SEQ ID NO: 8250 - DNA, 15 bp, synthetic construct
  source 1..15: mol_type = other DNA
ccaatgatggaccca

SEQ ID NO: 8251 - DNA, 15 bp, synthetic construct
  source 1..15: mol_type = other DNA
aggttgaatgcctgg

SEQ ID NO: 8252 - DNA, 15 bp, synthetic construct
  source 1..15: mol_type = other DNA
agtagaccagcttca

SEQ ID NO: 8253 - DNA, 15 bp, synthetic construct
  source 1..15: mol_type = other DNA
aggagcgaacagctc

SEQ ID NO: 8254 - DNA, 15 bp, synthetic construct
  source 1..15: mol_type = other DNA
acatctaaagtcagg

SEQ ID NO: 8255 - DNA, 15 bp, synthetic construct
  source 1..15: mol_type = other DNA
gttgtatttttggca

SEQ ID NO: 8256 - DNA, 15 bp, synthetic construct
  source 1..15: mol_type = other DNA
tgcatgatctgctgc

SEQ ID NO: 8257 - DNA, 15 bp, synthetic construct
  source 1..15: mol_type = other DNA
gtagtacaggcgcag

SEQ ID NO: 8258 - DNA, 15 bp, synthetic construct
  source 1..15: mol_type = other DNA
tttggaaaagccctt

SEQ ID NO: 8259 - DNA, 15 bp, synthetic construct
  source 1..15: mol_type = other DNA
cctgaaatacatggc

SEQ ID NO: 8260 - DNA, 15 bp, synthetic construct
  source 1..15: mol_type = other DNA
cccttgagcacattt

SEQ ID NO: 8261 - DNA, 15 bp, synthetic construct
  source 1..15: mol_type = other DNA
gggcaagtggttccg

SEQ ID NO: 8262 - DNA, 15 bp, synthetic construct
  source 1..15: mol_type = other DNA
cctcgcgttctgcgt

SEQ ID NO: 8263 - DNA, 15 bp, synthetic construct
  source 1..15: mol_type = other DNA
ggcagggttattatg

SEQ ID NO: 8264 - DNA, 15 bp, synthetic construct
  source 1..15: mol_type = other DNA
ccacacccgatgtac

SEQ ID NO: 8265 - DNA, 15 bp, synthetic construct
  source 1..15: mol_type = other DNA
ggtgatgaaaagcaa

SEQ ID NO: 8266 - DNA, 15 bp, synthetic construct
  source 1..15: mol_type = other DNA
gaacacacgtcaccc

SEQ ID NO: 8267 - DNA, 15 bp, synthetic construct
  source 1..15: mol_type = other DNA
gtaggctattcgtgt

SEQ ID NO: 8268 - DNA, 15 bp, synthetic construct
  source 1..15: mol_type = other DNA
tcctgttttgaacaa

SEQ ID NO: 8269 - DNA, 15 bp, synthetic construct
  source 1..15: mol_type = other DNA
accacagcaatgaag

SEQ ID NO: 8270 - DNA, 15 bp, synthetic construct
  source 1..15: mol_type = other DNA
gtcctttctagccat

SEQ ID NO: 8271 - DNA, 15 bp, synthetic construct
  source 1..15: mol_type = other DNA
ggtctctgtgtagta

SEQ ID NO: 8272 - DNA, 15 bp, synthetic construct
  source 1..15: mol_type = other DNA
tgccgtttcagcatc

SEQ ID NO: 8273 - DNA, 15 bp, synthetic construct
  source 1..15: mol_type = other DNA
tggaatgtatcatca

SEQ ID NO: 8274 - DNA, 15 bp, synthetic construct
  source 1..15: mol_type = other DNA
atggtaaggtgtgaa

SEQ ID NO: 8275 - DNA, 15 bp, synthetic construct
  source 1..15: mol_type = other DNA
ttctcagtgagtggg

SEQ ID NO: 8276 - DNA, 15 bp, synthetic construct
  source 1..15: mol_type = other DNA
aacactagcgcagtt

SEQ ID NO: 8277 - DNA, 15 bp, synthetic construct
  source 1..15: mol_type = other DNA
tgcacacgccttttg

SEQ ID NO: 8278 - DNA, 15 bp, synthetic construct
  source 1..15: mol_type = other DNA
gaacgaatgtctttg

SEQ ID NO: 8279 - DNA, 15 bp, synthetic construct
  source 1..15: mol_type = other DNA
ccacgagcccaatga

SEQ ID NO: 8280 - DNA, 15 bp, synthetic construct
  source 1..15: mol_type = other DNA
gtgcatagaggtcac

SEQ ID NO: 8281 - DNA, 15 bp, synthetic construct
  source 1..15: mol_type = other DNA
tatgttgttctcttg

SEQ ID NO: 8282 - DNA, 15 bp, synthetic construct
  source 1..15: mol_type = other DNA
atactccatgcatgt

SEQ ID NO: 8283 - DNA, 15 bp, synthetic construct
  source 1..15: mol_type = other DNA
tgcaaagaagtagat

SEQ ID NO: 8284 - DNA, 15 bp, synthetic construct
  source 1..15: mol_type = other DNA
cattgggagttatta

SEQ ID NO: 8285 - DNA, 15 bp, synthetic construct
  source 1..15: mol_type = other DNA
ctgacttcacagcac

SEQ ID NO: 8286 - DNA, 15 bp, synthetic construct
  source 1..15: mol_type = other DNA
cagcagatctgagaa

SEQ ID NO: 8287 - DNA, 15 bp, synthetic construct
  source 1..15: mol_type = other DNA
gggaagtcctgcaaa

SEQ ID NO: 8288 - DNA, 15 bp, synthetic construct
  source 1..15: mol_type = other DNA
agggcggagtaaaat

SEQ ID NO: 8289 - DNA, 15 bp, synthetic construct
  source 1..15: mol_type = other DNA
gagtgtctgagcaaa

SEQ ID NO: 8290 - DNA, 15 bp, synthetic construct
  source 1..15: mol_type = other DNA
agcatcctgctcttt

SEQ ID NO: 8291 - DNA, 15 bp, synthetic construct
  source 1..15: mol_type = other DNA
cctctggctttgctg

SEQ ID NO: 8292 - DNA, 15 bp, synthetic construct
  source 1..15: mol_type = other DNA
tggactttcgggttg

SEQ ID NO: 8293 - DNA, 15 bp, synthetic construct
  source 1..15: mol_type = other DNA
tcagggcatcaaaga

SEQ ID NO: 8294 - DNA, 15 bp, synthetic construct
  source 1..15: mol_type = other DNA
ggtatcaacttgaat

SEQ ID NO: 8295 - DNA, 15 bp, synthetic construct
  source 1..15: mol_type = other DNA
ctggcctttgttcag

SEQ ID NO: 8296 - DNA, 15 bp, synthetic construct
  source 1..15: mol_type = other DNA
aactgtgatatccat

SEQ ID NO: 8297 - DNA, 15 bp, synthetic construct
  source 1..15: mol_type = other DNA
tttgctgatgggatg

SEQ ID NO: 8298 - DNA, 15 bp, synthetic construct
  source 1..15: mol_type = other DNA
tcgttcttcatccct

SEQ ID NO: 8299 - DNA, 15 bp, synthetic construct
  source 1..15: mol_type = other DNA
tgatgctcatcatcg

SEQ ID NO: 8300 - DNA, 15 bp, synthetic construct
  source 1..15: mol_type = other DNA
tctgaattcatgcca

SEQ ID NO: 8301 - DNA, 15 bp, synthetic construct
  source 1..15: mol_type = other DNA
tgtcgaagtgatttt

SEQ ID NO: 8302 - DNA, 15 bp, synthetic construct
  source 1..15: mol_type = other DNA
gtgcttcattctgaa

SEQ ID NO: 8303 - DNA, 15 bp, synthetic construct
  source 1..15: mol_type = other DNA
ttgatgtcccatgtg

SEQ ID NO: 8304 - DNA, 15 bp, synthetic construct
  source 1..15: mol_type = other DNA
ggctgagtatcgaga

SEQ ID NO: 8305 - DNA, 15 bp, synthetic construct
  source 1..15: mol_type = other DNA
gcaagttggcaaagt

SEQ ID NO: 8306 - DNA, 15 bp, synthetic construct
  source 1..15: mol_type = other DNA
aaggtctctgagaag

SEQ ID NO: 8307 - DNA, 15 bp, synthetic construct
  source 1..15: mol_type = other DNA
ggttcttctatccgg

SEQ ID NO: 8308 - DNA, 15 bp, synthetic construct
  source 1..15: mol_type = other DNA
cgcaatctcctcgat

SEQ ID NO: 8309 - DNA, 15 bp, synthetic construct
  source 1..15: mol_type = other DNA
acaggcttgttgctg

SEQ ID NO: 8310 - DNA, 15 bp, synthetic construct
  source 1..15: mol_type = other DNA
cttcaccctccaatt

SEQ ID NO: 8311 - DNA, 15 bp, synthetic construct
  source 1..15: mol_type = other DNA
gagtgccagtacttc

SEQ ID NO: 8312 - DNA, 15 bp, synthetic construct
  source 1..15: mol_type = other DNA
caatgcatctttgtt

SEQ ID NO: 8313 - DNA, 15 bp, synthetic construct
  source 1..15: mol_type = other DNA
cccttctgggaagag

SEQ ID NO: 8314 - DNA, 15 bp, synthetic construct
  source 1..15: mol_type = other DNA
gctgaactggtcagt

SEQ ID NO: 8315 - DNA, 15 bp, synthetic construct
  source 1..15: mol_type = other DNA
ggtcatagcatggat

SEQ ID NO: 8316 - DNA, 15 bp, synthetic construct
  source 1..15: mol_type = other DNA
tcggaccaagatgca

SEQ ID NO: 8317 - DNA, 15 bp, synthetic construct
  source 1..15: mol_type = other DNA
gcacgagtctcttcc

SEQ ID NO: 8318 - DNA, 15 bp, synthetic construct
  source 1..15: mol_type = other DNA
gactaagtaggacca

SEQ ID NO: 8319 - DNA, 15 bp, synthetic construct
  source 1..15: mol_type = other DNA
tttgttggctcttcc

SEQ ID NO: 8320 - DNA, 15 bp, synthetic construct
  source 1..15: mol_type = other DNA
acgacaactgagaga

SEQ ID NO: 8321 - DNA, 15 bp, synthetic construct
  source 1..15: mol_type = other DNA
gtctccgcatttatt

SEQ ID NO: 8322 - DNA, 15 bp, synthetic construct
  source 1..15: mol_type = other DNA
tgcagtcaacaccca

SEQ ID NO: 8323 - DNA, 15 bp, synthetic construct
  source 1..15: mol_type = other DNA
cctcggaaaacaccc

SEQ ID NO: 8324 - DNA, 15 bp, synthetic construct
  source 1..15: mol_type = other DNA
gctgtcccacatcaa

SEQ ID NO: 8325 - DNA, 15 bp, synthetic construct
  source 1..15: mol_type = other DNA
tctttgagagaagaa

SEQ ID NO: 8326 - DNA, 15 bp, synthetic construct
  source 1..15: mol_type = other DNA
cacaaaccatattca

SEQ ID NO: 8327 - DNA, 15 bp, synthetic construct
  source 1..15: mol_type = other DNA
aggaaacggttattt

SEQ ID NO: 8328 - DNA, 15 bp, synthetic construct
  source 1..15: mol_type = other DNA
tcttttagctcttgg

SEQ ID NO: 8329 - DNA, 15 bp, synthetic construct
  source 1..15: mol_type = other DNA
tctcccagtgtaaat

SEQ ID NO: 8330 - DNA, 15 bp, synthetic construct
  source 1..15: mol_type = other DNA
gaagacacacctggt

SEQ ID NO: 8331 - DNA, 15 bp, synthetic construct
  source 1..15: mol_type = other DNA
tggtaagtttgcaga

SEQ ID NO: 8332 - DNA, 15 bp, synthetic construct
  source 1..15: mol_type = other DNA
ctcagctaagaggta

SEQ ID NO: 8333 - DNA, 15 bp, synthetic construct
  source 1..15: mol_type = other DNA
ccaaagaagcaccat

SEQ ID NO: 8334 - DNA, 15 bp, synthetic construct
  source 1..15: mol_type = other DNA
cagtgtacaaagctt

SEQ ID NO: 8335 - DNA, 15 bp, synthetic construct
  source 1..15: mol_type = other DNA
aggcatgccattgtt

SEQ ID NO: 8336 - DNA, 15 bp, synthetic construct
  source 1..15: mol_type = other DNA
gcacgaagtcgtctc

SEQ ID NO: 8337 - DNA, 15 bp, synthetic construct
  source 1..15: mol_type = other DNA
ccagagagaaatatc

SEQ ID NO: 8338 - DNA, 15 bp, synthetic construct
  source 1..15: mol_type = other DNA
cagaagcaggattgg

SEQ ID NO: 8339 - DNA, 15 bp, synthetic construct
  source 1..15: mol_type = other DNA
gagccaatccaggca

SEQ ID NO: 8340 - DNA, 15 bp, synthetic construct
  source 1..15: mol_type = other DNA
acttctgatcccaga

SEQ ID NO: 8341 - DNA, 15 bp, synthetic construct
  source 1..15: mol_type = other DNA
gtgggcacagtttcc

SEQ ID NO: 8342 - DNA, 15 bp, synthetic construct
  source 1..15: mol_type = other DNA
ggccaccttgttaca

SEQ ID NO: 8343 - DNA, 15 bp, synthetic construct
  source 1..15: mol_type = other DNA
tacttgagtctccag

SEQ ID NO: 8344 - DNA, 15 bp, synthetic construct
  source 1..15: mol_type = other DNA
tggcgtaagtcagat

SEQ ID NO: 8345 - DNA, 15 bp, synthetic construct
  source 1..15: mol_type = other DNA
ccacgcacaactcaa

SEQ ID NO: 8346 - DNA, 15 bp, synthetic construct
  source 1..15: mol_type = other DNA
tcttgtagtgtgtgt

SEQ ID NO: 8347 - DNA, 15 bp, synthetic construct
  source 1..15: mol_type = other DNA
ttgaaaccggtctgt

SEQ ID NO: 8348 - DNA, 15 bp, synthetic construct
  source 1..15: mol_type = other DNA
gagaataccttgggc

SEQ ID NO: 8349 - DNA, 15 bp, synthetic construct
  source 1..15: mol_type = other DNA
gttggtgttgactcc

SEQ ID NO: 8350 - DNA, 15 bp, synthetic construct
  source 1..15: mol_type = other DNA
tcagcaacacttcct

SEQ ID NO: 8351 - DNA, 15 bp, synthetic construct
  source 1..15: mol_type = other DNA
cttccgactcttctc

SEQ ID NO: 8352 - DNA, 15 bp, synthetic construct
  source 1..15: mol_type = other DNA
acaccagagatccat

SEQ ID NO: 8353 - DNA, 15 bp, synthetic construct
  source 1..15: mol_type = other DNA
cacaaagtcctttct

SEQ ID NO: 8354 - DNA, 15 bp, synthetic construct
  source 1..15: mol_type = other DNA
atgtagactcctgga

SEQ ID NO: 8355 - DNA, 15 bp, synthetic construct
  source 1..15: mol_type = other DNA
tgcctgctgttagag

SEQ ID NO: 8356 - DNA, 15 bp, synthetic construct
  source 1..15: mol_type = other DNA
ttgccatggaagaga

SEQ ID NO: 8357 - DNA, 15 bp, synthetic construct
  source 1..15: mol_type = other DNA
cattctttgagagag

SEQ ID NO: 8358 - DNA, 15 bp, synthetic construct
  source 1..15: mol_type = other DNA
gagactatagcgtgg

SEQ ID NO: 8359 - DNA, 15 bp, synthetic construct
  source 1..15: mol_type = other DNA
aggttttggatctta

SEQ ID NO: 8360 - DNA, 15 bp, synthetic construct
  source 1..15: mol_type = other DNA
atagagagctgctat

SEQ ID NO: 8361 - DNA, 15 bp, synthetic construct
  source 1..15: mol_type = other DNA
ccacaaacgtgatgt

SEQ ID NO: 8362 - DNA, 15 bp, synthetic construct
  source 1..15: mol_type = other DNA
ccagcagaagttaca

SEQ ID NO: 8363 - DNA, 15 bp, synthetic construct
  source 1..15: mol_type = other DNA
tttcttggttaacag

SEQ ID NO: 8364 - DNA, 15 bp, synthetic construct
  source 1..15: mol_type = other DNA
cccaactctaacctg

SEQ ID NO: 8365 - DNA, 15 bp, synthetic construct
  source 1..15: mol_type = other DNA
tgaggcgggacaagg

SEQ ID NO: 8366 - DNA, 15 bp, synthetic construct
  source 1..15: mol_type = other DNA
aagggcctatctcat

SEQ ID NO: 8367 - DNA, 15 bp, synthetic construct
  source 1..15: mol_type = other DNA
ggccataaatggcct

SEQ ID NO: 8368 - DNA, 15 bp, synthetic construct
  source 1..15: mol_type = other DNA
tgcactgcaagatca

SEQ ID NO: 8369 - DNA, 15 bp, synthetic construct
  source 1..15: mol_type = other DNA
ccagcatggtagaaa

SEQ ID NO: 8370 - DNA, 15 bp, synthetic construct
  source 1..15: mol_type = other DNA
acagtaacagtgact

SEQ ID NO: 8371 - DNA, 15 bp, synthetic construct
  source 1..15: mol_type = other DNA
agtgcaaaaatggac

SEQ ID NO: 8372 - DNA, 15 bp, synthetic construct
  source 1..15: mol_type = other DNA
gaaggtcttaatgaa

SEQ ID NO: 8373 - DNA, 15 bp, synthetic construct
  source 1..15: mol_type = other DNA
tttggtgataaaagg

SEQ ID NO: 8374 - DNA, 15 bp, synthetic construct
  source 1..15: mol_type = other DNA
ttattcagtgacctt

SEQ ID NO: 8375 - DNA, 15 bp, synthetic construct
  source 1..15: mol_type = other DNA
gccagtaaccttgca

SEQ ID NO: 8376 - DNA, 15 bp, synthetic construct
  source 1..15: mol_type = other DNA
tctagagtcccgtaa

SEQ ID NO: 8377 - DNA, 15 bp, synthetic construct
  source 1..15: mol_type = other DNA
atgtagatgcctatt

SEQ ID NO: 8378 - DNA, 15 bp, synthetic construct
  source 1..15: mol_type = other DNA
agtcaggtgacacag

SEQ ID NO: 8379 - DNA, 15 bp, synthetic construct
  source 1..15: mol_type = other DNA
aaaccaaagttctct

SEQ ID NO: 8380 - DNA, 15 bp, synthetic construct
  source 1..15: mol_type = other DNA
gtctgtttccctgtg

SEQ ID NO: 8381 - DNA, 15 bp, synthetic construct
  source 1..15: mol_type = other DNA
aaaacacagattgct

SEQ ID NO: 8382 - DNA, 15 bp, synthetic construct
  source 1..15: mol_type = other DNA
cagatgtgaaggcca

SEQ ID NO: 8383 - DNA, 15 bp, synthetic construct
  source 1..15: mol_type = other DNA
tcattcattatgcct

SEQ ID NO: 8384 - DNA, 15 bp, synthetic construct
  source 1..15: mol_type = other DNA
ctgcagtgaagtctc

SEQ ID NO: 8385 - DNA, 15 bp, synthetic construct
  source 1..15: mol_type = other DNA
aaattaaagcgccga

SEQ ID NO: 8386 - DNA, 15 bp, synthetic construct
  source 1..15: mol_type = other DNA
ccaagactcaagcgg

SEQ ID NO: 8387 - DNA, 15 bp, synthetic construct
  source 1..15: mol_type = other DNA
ttttgtcctgtgaaa

SEQ ID NO: 8388 - DNA, 15 bp, synthetic construct
  source 1..15: mol_type = other DNA
ccacgttgccacatt

SEQ ID NO: 8389 - DNA, 15 bp, synthetic construct
  source 1..15: mol_type = other DNA
ataagcaagacagat

SEQ ID NO: 8390 - DNA, 15 bp, synthetic construct
  source 1..15: mol_type = other DNA
agaaaagtcagagga

SEQ ID NO: 8391 - DNA, 15 bp, synthetic construct
  source 1..15: mol_type = other DNA
agcaggacacagtca

SEQ ID NO: 8392 - DNA, 15 bp, synthetic construct
  source 1..15: mol_type = other DNA
tggaggatgattcgc

SEQ ID NO: 8393 - DNA, 15 bp, synthetic construct
  source 1..15: mol_type = other DNA
ttatagtaacactgc

SEQ ID NO: 8394 - DNA, 15 bp, synthetic construct
  source 1..15: mol_type = other DNA
tgggtacttcttcca

SEQ ID NO: 8395 - DNA, 15 bp, synthetic construct
  source 1..15: mol_type = other DNA
ctagctcagcacacc

SEQ ID NO: 8396 - DNA, 15 bp, synthetic construct
  source 1..15: mol_type = other DNA
cacatcctgtaagtg

SEQ ID NO: 8397 - DNA, 15 bp, synthetic construct
  source 1..15: mol_type = other DNA
ggagagaattgtggc

SEQ ID NO: 8398 - DNA, 15 bp, synthetic construct
  source 1..15: mol_type = other DNA
ttggatctatggcat

SEQ ID NO: 8399 - DNA, 15 bp, synthetic construct
  source 1..15: mol_type = other DNA
ggccaatacacacca

SEQ ID NO: 8400 - DNA, 15 bp, synthetic construct
  source 1..15: mol_type = other DNA
ctcatcaacctctca

SEQ ID NO: 8401 - DNA, 15 bp, synthetic construct
  source 1..15: mol_type = other DNA
gagccagcactagga

SEQ ID NO: 8402 - DNA, 15 bp, synthetic construct
  source 1..15: mol_type = other DNA
tcacatggttgcttg

SEQ ID NO: 8403 - DNA, 15 bp, synthetic construct
  source 1..15: mol_type = other DNA
atcattggtctgcaa

SEQ ID NO: 8404 - DNA, 15 bp, synthetic construct
  source 1..15: mol_type = other DNA
accctaggtgacatc

SEQ ID NO: 8405 - DNA, 15 bp, synthetic construct
  source 1..15: mol_type = other DNA
ctcctctctgcaaat

SEQ ID NO: 8406 - DNA, 15 bp, synthetic construct
  source 1..15: mol_type = other DNA
gttaacatggaattg

SEQ ID NO: 8407 - DNA, 15 bp, synthetic construct
  source 1..15: mol_type = other DNA
accttaaacagccca

SEQ ID NO: 8408 - DNA, 15 bp, synthetic construct
  source 1..15: mol_type = other DNA
ctttgcagaaacaaa

SEQ ID NO: 8409 - DNA, 15 bp, synthetic construct
  source 1..15: mol_type = other DNA
tggtgggacaaggtt

SEQ ID NO: 8410 - DNA, 15 bp, synthetic construct
  source 1..15: mol_type = other DNA
cttcaatttgtttgg

SEQ ID NO: 8411 - DNA, 15 bp, synthetic construct
  source 1..15: mol_type = other DNA
ccactcaaagctggc

SEQ ID NO: 8412 - DNA, 15 bp, synthetic construct
  source 1..15: mol_type = other DNA
ggctttagaacagcg

SEQ ID NO: 8413 - DNA, 15 bp, synthetic construct
  source 1..15: mol_type = other DNA
cagagagtaagcttg

SEQ ID NO: 8414 - DNA, 15 bp, synthetic construct
  source 1..15: mol_type = other DNA
gaaggttgaggagtt

SEQ ID NO: 8415 - DNA, 15 bp, synthetic construct
  source 1..15: mol_type = other DNA
tgttccgcccaacac

SEQ ID NO: 8416 - DNA, 15 bp, synthetic construct
  source 1..15: mol_type = other DNA
ctcttcaggaacaat

SEQ ID NO: 8417 - DNA, 15 bp, synthetic construct
  source 1..15: mol_type = other DNA
aggagttccaacaga

SEQ ID NO: 8418 - DNA, 15 bp, synthetic construct
  source 1..15: mol_type = other DNA
tgtggaatgtggtgt

SEQ ID NO: 8419 - DNA, 15 bp, synthetic construct
  source 1..15: mol_type = other DNA
gatagtgtactgaaa

SEQ ID NO: 8420 - DNA, 15 bp, synthetic construct
  source 1..15: mol_type = other DNA
agaaacacgtggact

SEQ ID NO: 8421 - DNA, 15 bp, synthetic construct
  source 1..15: mol_type = other DNA
ggacaggtctgaaaa

SEQ ID NO: 8422 - DNA, 15 bp, synthetic construct
  source 1..15: mol_type = other DNA
aggactcctacttgg

SEQ ID NO: 8423 - DNA, 15 bp, synthetic construct
  source 1..15: mol_type = other DNA
gcgtactttcctgct

SEQ ID NO: 8424 - DNA, 15 bp, synthetic construct
  source 1..15: mol_type = other DNA
tagttggagcgcttt

SEQ ID NO: 8425 - DNA, 15 bp, synthetic construct
  source 1..15: mol_type = other DNA
gatgaagatggtccc

SEQ ID NO: 8426 - DNA, 15 bp, synthetic construct
  source 1..15: mol_type = other DNA
gggagatagtggaac

SEQ ID NO: 8427 - DNA, 15 bp, synthetic construct
  source 1..15: mol_type = other DNA
gggctgtttgtgagc

SEQ ID NO: 8428 - DNA, 15 bp, synthetic construct
  source 1..15: mol_type = other DNA
gaagccagctagatg

SEQ ID NO: 8429 - DNA, 15 bp, synthetic construct
  source 1..15: mol_type = other DNA
cctcaaagctggcaa

SEQ ID NO: 8430 - DNA, 15 bp, synthetic construct
  source 1..15: mol_type = other DNA
accctgcagtcgtaa

SEQ ID NO: 8431 - DNA, 15 bp, synthetic construct
  source 1..15: mol_type = other DNA
cagtgcttgagaaga

SEQ ID NO: 8432 - DNA, 15 bp, synthetic construct
  source 1..15: mol_type = other DNA
caaacataaactcgc

SEQ ID NO: 8433 - DNA, 15 bp, synthetic construct
  source 1..15: mol_type = other DNA
cgctctgttgggagt

SEQ ID NO: 8434 - DNA, 15 bp, synthetic construct
  source 1..15: mol_type = other DNA
aaaatcctagcacag

SEQ ID NO: 8435 - DNA, 15 bp, synthetic construct
  source 1..15: mol_type = other DNA
tgctgcattgctttt

SEQ ID NO: 8436 - DNA, 15 bp, synthetic construct
  source 1..15: mol_type = other DNA
atagaactcggcctg

SEQ ID NO: 8437 - DNA, 15 bp, synthetic construct
  source 1..15: mol_type = other DNA
atttcgaagccacgt

SEQ ID NO: 8438 - DNA, 15 bp, synthetic construct
  source 1..15: mol_type = other DNA
aagatgactgctttc

SEQ ID NO: 8439 - DNA, 15 bp, synthetic construct
  source 1..15: mol_type = other DNA
ggcattccatagcag

SEQ ID NO: 8440 - DNA, 15 bp, synthetic construct
  source 1..15: mol_type = other DNA
ggctttgtccacagc

SEQ ID NO: 8441 - DNA, 15 bp, synthetic construct
  source 1..15: mol_type = other DNA
ttgccagctttgtaa

SEQ ID NO: 8442 - DNA, 15 bp, synthetic construct
  source 1..15: mol_type = other DNA
tgattcctgagcgct

SEQ ID NO: 8443 - DNA, 15 bp, synthetic construct
  source 1..15: mol_type = other DNA
atgaaacagatgagg

SEQ ID NO: 8444 - DNA, 15 bp, synthetic construct
  source 1..15: mol_type = other DNA
gttaatttgtcaggc

SEQ ID NO: 8445 - DNA, 15 bp, synthetic construct
  source 1..15: mol_type = other DNA
aaccttttaggagta

SEQ ID NO: 8446 - DNA, 15 bp, synthetic construct
  source 1..15: mol_type = other DNA
atgacacctactgaa

SEQ ID NO: 8447 - DNA, 15 bp, synthetic construct
  source 1..15: mol_type = other DNA
catccacggaaacat

SEQ ID NO: 8448 - DNA, 15 bp, synthetic construct
  source 1..15: mol_type = other DNA
ctttcctgaagaaca

SEQ ID NO: 8449 - DNA, 15 bp, synthetic construct
  source 1..15: mol_type = other DNA
actcaggtttttctg

SEQ ID NO: 8450 - DNA, 15 bp, synthetic construct
  source 1..15: mol_type = other DNA
actaaggagctagcg

SEQ ID NO: 8451 - DNA, 15 bp, synthetic construct
  source 1..15: mol_type = other DNA
acagcactgcacgga

SEQ ID NO: 8452 - DNA, 15 bp, synthetic construct
  source 1..15: mol_type = other DNA
ctggtttaaaaccag

SEQ ID NO: 8453 - DNA, 15 bp, synthetic construct
  source 1..15: mol_type = other DNA
ttacaagggcggttc

SEQ ID NO: 8454 - DNA, 15 bp, synthetic construct
  source 1..15: mol_type = other DNA
agacgcattttacaa

SEQ ID NO: 8455 - DNA, 15 bp, synthetic construct
  source 1..15: mol_type = other DNA
ttatcgtatccgtaa

SEQ ID NO: 8456 - DNA, 15 bp, synthetic construct
  source 1..15: mol_type = other DNA
gtgggaaacctcgat

SEQ ID NO: 8457 - DNA, 15 bp, synthetic construct
  source 1..15: mol_type = other DNA
cctttccaacaaaga

SEQ ID NO: 8458 - DNA, 15 bp, synthetic construct
  source 1..15: mol_type = other DNA
ggtcagtatcaaatt

SEQ ID NO: 8459 - DNA, 15 bp, synthetic construct
  source 1..15: mol_type = other DNA
ctgggtcctcgccaa

SEQ ID NO: 8460 - DNA, 15 bp, synthetic construct
  source 1..15: mol_type = other DNA
aagcgactgtaggtt

SEQ ID NO: 8461 - DNA, 15 bp, synthetic construct
  source 1..15: mol_type = other DNA
acgttgttgaggcaa

SEQ ID NO: 8462 - DNA, 15 bp, synthetic construct
  source 1..15: mol_type = other DNA
agatttttacctgtc

SEQ ID NO: 8463 - DNA, 15 bp, synthetic construct
  source 1..15: mol_type = other DNA
ttgtacttggagtac

SEQ ID NO: 8464 - DNA, 15 bp, synthetic construct
  source 1..15: mol_type = other DNA
accgcataaagaact

SEQ ID NO: 8465 - DNA, 15 bp, synthetic construct
  source 1..15: mol_type = other DNA
tgccgggaaacggga

SEQ ID NO: 8466 - DNA, 15 bp, synthetic construct
  source 1..15: mol_type = other DNA
ttaaacacccaaatc

SEQ ID NO: 8467 - DNA, 15 bp, synthetic construct
  source 1..15: mol_type = other DNA
agtcgtagtaagtgg

SEQ ID NO: 8468 - DNA, 15 bp, synthetic construct
  source 1..15: mol_type = other DNA
cttcaatttcaggtt

SEQ ID NO: 8469 - DNA, 15 bp, synthetic construct
  source 1..15: mol_type = other DNA
gccagagaaacactt

SEQ ID NO: 8470 - DNA, 15 bp, synthetic construct
  source 1..15: mol_type = other DNA
ttgtctgcattcctg

SEQ ID NO: 8471 - DNA, 15 bp, synthetic construct
  source 1..15: mol_type = other DNA
cctcagccagagatt

SEQ ID NO: 8472 - DNA, 15 bp, synthetic construct
  source 1..15: mol_type = other DNA
gggatccagacggtc

SEQ ID NO: 8473 - DNA, 15 bp, synthetic construct
  source 1..15: mol_type = other DNA
tttggaaaacaagcc

SEQ ID NO: 8474 - DNA, 15 bp, synthetic construct
  source 1..15: mol_type = other DNA
gcctcatcatcgctt

SEQ ID NO: 8475 - DNA, 15 bp, synthetic construct
  source 1..15: mol_type = other DNA
ccatccacaagactg

SEQ ID NO: 8476 - DNA, 15 bp, synthetic construct
  source 1..15: mol_type = other DNA
ccgccagttcagtaa

SEQ ID NO: 8477 - DNA, 15 bp, synthetic construct
  source 1..15: mol_type = other DNA
tacaactttaagcag

SEQ ID NO: 8478 - DNA, 15 bp, synthetic construct
  source 1..15: mol_type = other DNA
acagtgcacgttacc

SEQ ID NO: 8479 - DNA, 15 bp, synthetic construct
  source 1..15: mol_type = other DNA
tttggcactaactgt

SEQ ID NO: 8480 - DNA, 15 bp, synthetic construct
  source 1..15: mol_type = other DNA
cacaggaccaacggc

SEQ ID NO: 8481 - DNA, 15 bp, synthetic construct
  source 1..15: mol_type = other DNA
aaagcattactagct

SEQ ID NO: 8482 - DNA, 15 bp, synthetic construct
  source 1..15: mol_type = other DNA
gatttggtctactta

SEQ ID NO: 8483 - DNA, 15 bp, synthetic construct
  source 1..15: mol_type = other DNA
gagacagagtagagt

SEQ ID NO: 8484 - DNA, 15 bp, synthetic construct
  source 1..15: mol_type = other DNA
acggtcaactagacc

SEQ ID NO: 8485 - DNA, 15 bp, synthetic construct
  source 1..15: mol_type = other DNA
taagagaacacatgt

SEQ ID NO: 8486 - DNA, 15 bp, synthetic construct
  source 1..15: mol_type = other DNA
gctgggaagaccatg

SEQ ID NO: 8487 - DNA, 15 bp, synthetic construct
  source 1..15: mol_type = other DNA
aggtaggcttttaac

SEQ ID NO: 8488 - DNA, 15 bp, synthetic construct
  source 1..15: mol_type = other DNA
tttaaccatctcctg

SEQ ID NO: 8489 - DNA, 15 bp, synthetic construct
  source 1..15: mol_type = other DNA
cagtagcctaagcaa

SEQ ID NO: 8490 - DNA, 15 bp, synthetic construct
  source 1..15: mol_type = other DNA
ctagtacatgcagaa

SEQ ID NO: 8491 - DNA, 15 bp, synthetic construct
  source 1..15: mol_type = other DNA
cgtccttcatccata

SEQ ID NO: 8492 - DNA, 15 bp, synthetic construct
  source 1..15: mol_type = other DNA
tcgctccaagaagat

SEQ ID NO: 8493 - DNA, 15 bp, synthetic construct
  source 1..15: mol_type = other DNA
tctcactcaacagca

SEQ ID NO: 8494 - DNA, 15 bp, synthetic construct
  source 1..15: mol_type = other DNA
tgagatggcccgatg

SEQ ID NO: 8495 - DNA, 15 bp, synthetic construct
  source 1..15: mol_type = other DNA
aggtccgcgtcagag

SEQ ID NO: 8496 - DNA, 15 bp, synthetic construct
  source 1..15: mol_type = other DNA
gaagaaaagcagagg

SEQ ID NO: 8497 - DNA, 15 bp, synthetic construct
  source 1..15: mol_type = other DNA
cgaaggaaggaaacc

SEQ ID NO: 8498 - DNA, 15 bp, synthetic construct
  source 1..15: mol_type = other DNA
ggagacagtggtatc

SEQ ID NO: 8499 - DNA, 15 bp, synthetic construct
  source 1..15: mol_type = other DNA
tgctagcatgtgaga

SEQ ID NO: 8500 - DNA, 15 bp, synthetic construct
  source 1..15: mol_type = other DNA
tacaattgctttcga

SEQ ID NO: 8501 - DNA, 15 bp, synthetic construct
  source 1..15: mol_type = other DNA
gccagaggcaaaacc

SEQ ID NO: 8502 - DNA, 15 bp, synthetic construct
  source 1..15: mol_type = other DNA
tggccatagcgtttg

SEQ ID NO: 8503 - DNA, 15 bp, synthetic construct
  source 1..15: mol_type = other DNA
cctgcactgttccat

SEQ ID NO: 8504 - DNA, 15 bp, synthetic construct
  source 1..15: mol_type = other DNA
atcttgagcatatcg

SEQ ID NO: 8505 - DNA, 15 bp, synthetic construct
  source 1..15: mol_type = other DNA
cttaaaactagagga

SEQ ID NO: 8506 - DNA, 15 bp, synthetic construct
  source 1..15: mol_type = other DNA
ccgaagggtacagat

SEQ ID NO: 8507 - DNA, 15 bp, synthetic construct
  source 1..15: mol_type = other DNA
ccatttgcttgtaga

SEQ ID NO: 8508 - DNA, 15 bp, synthetic construct
  source 1..15: mol_type = other DNA
cactcatccgacgtc

SEQ ID NO: 8509 - DNA, 15 bp, synthetic construct
  source 1..15: mol_type = other DNA
ccactctttgctgaa

SEQ ID NO: 8510 - DNA, 15 bp, synthetic construct
  source 1..15: mol_type = other DNA
agcaggaccaatcat

SEQ ID NO: 8511 - DNA, 15 bp, synthetic construct
  source 1..15: mol_type = other DNA
ttcctgctctggttt

SEQ ID NO: 8512 - DNA, 15 bp, synthetic construct
  source 1..15: mol_type = other DNA
tggctttaataaagg

SEQ ID NO: 8513 - DNA, 15 bp, synthetic construct
  source 1..15: mol_type = other DNA
tgccagcagttactg

SEQ ID NO: 8514 - DNA, 15 bp, synthetic construct
  source 1..15: mol_type = other DNA
tcaacttggatctca

SEQ ID NO: 8515 - DNA, 15 bp, synthetic construct
  source 1..15: mol_type = other DNA
gcgtttttctcgccg

SEQ ID NO: 8516 - DNA, 15 bp, synthetic construct
  source 1..15: mol_type = other DNA
tttcaccggaacagc

SEQ ID NO: 8517 - DNA, 15 bp, synthetic construct
  source 1..15: mol_type = other DNA
ggctgttgtccgtct

SEQ ID NO: 8518 - DNA, 15 bp, synthetic construct
  source 1..15: mol_type = other DNA
gctcatcatggaaat

SEQ ID NO: 8519 - DNA, 15 bp, synthetic construct
  source 1..15: mol_type = other DNA
tgcatagctgtgttg

SEQ ID NO: 8520 - DNA, 15 bp, synthetic construct
  source 1..15: mol_type = other DNA
gaatcccagggattg

SEQ ID NO: 8521 - DNA, 15 bp, synthetic construct
  source 1..15: mol_type = other DNA
ggccggaatcctttc

SEQ ID NO: 8522 - DNA, 15 bp, synthetic construct
  source 1..15: mol_type = other DNA
acctctcactttggg

SEQ ID NO: 8523 - DNA, 15 bp, synthetic construct
  source 1..15: mol_type = other DNA
ctgtgatcttgtctc

SEQ ID NO: 8524 - DNA, 15 bp, synthetic construct
  source 1..15: mol_type = other DNA
cctttggtgtggatg

SEQ ID NO: 8525 - DNA, 15 bp, synthetic construct
  source 1..15: mol_type = other DNA
tcaagaagacggtgt

SEQ ID NO: 8526 - DNA, 15 bp, synthetic construct
  source 1..15: mol_type = other DNA
tgcacgcatggatca

SEQ ID NO: 8527 - DNA, 15 bp, synthetic construct
  source 1..15: mol_type = other DNA
tgcatagagaacaca

SEQ ID NO: 8528 - DNA, 15 bp, synthetic construct
  source 1..15: mol_type = other DNA
accacggttttcgac

SEQ ID NO: 8529 - DNA, 15 bp, synthetic construct
  source 1..15: mol_type = other DNA
cagtcaggttctgct

SEQ ID NO: 8530 - DNA, 15 bp, synthetic construct
  source 1..15: mol_type = other DNA
ctgattcattccggg

SEQ ID NO: 8531 - DNA, 15 bp, synthetic construct
  source 1..15: mol_type = other DNA
gccacatgcagtgta

SEQ ID NO: 8532 - DNA, 15 bp, synthetic construct
  source 1..15: mol_type = other DNA
gtccacgttttccaa

SEQ ID NO: 8533 - DNA, 15 bp, synthetic construct
  source 1..15: mol_type = other DNA
catttgacaggtaag

SEQ ID NO: 8534 - DNA, 15 bp, synthetic construct
  source 1..15: mol_type = other DNA
ccatcgcagtgtgac

SEQ ID NO: 8535 - DNA, 15 bp, synthetic construct
  source 1..15: mol_type = other DNA
ccggtgacatcaggg

SEQ ID NO: 8536 - DNA, 15 bp, synthetic construct
  source 1..15: mol_type = other DNA
tctatgggtgctagt

SEQ ID NO: 8537 - DNA, 15 bp, synthetic construct
  source 1..15: mol_type = other DNA
agtcgggcatgaaat

SEQ ID NO: 8538 - DNA, 15 bp, synthetic construct
  source 1..15: mol_type = other DNA
caacactggaatcca

SEQ ID NO: 8539 - DNA, 15 bp, synthetic construct
  source 1..15: mol_type = other DNA
gcgagtgatccctga

SEQ ID NO: 8540 - DNA, 15 bp, synthetic construct
  source 1..15: mol_type = other DNA
gaatactggatcctt

SEQ ID NO: 8541 - DNA, 15 bp, synthetic construct
  source 1..15: mol_type = other DNA
agcaaacactcaccg

SEQ ID NO: 8542 - DNA, 15 bp, synthetic construct
  source 1..15: mol_type = other DNA
gcacacacaccgagg

SEQ ID NO: 8543 - DNA, 15 bp, synthetic construct
  source 1..15: mol_type = other DNA
gagcttcccttcgtc

SEQ ID NO: 8544 - DNA, 15 bp, synthetic construct
  source 1..15: mol_type = other DNA
tatcaagacgagcgg

SEQ ID NO: 8545 - DNA, 15 bp, synthetic construct
  source 1..15: mol_type = other DNA
aaaaaaggcaaagtc

SEQ ID NO: 8546 - DNA, 15 bp, synthetic construct
  source 1..15: mol_type = other DNA
tagatacacaagcaa

SEQ ID NO: 8547 - DNA, 15 bp, synthetic construct
  source 1..15: mol_type = other DNA
cggcagctctaaaat

SEQ ID NO: 8548 - DNA, 15 bp, synthetic construct
  source 1..15: mol_type = other DNA
gtcctctgaaataaa

SEQ ID NO: 8549 - DNA, 15 bp, synthetic construct
  source 1..15: mol_type = other DNA
tatcacagtccaagt

SEQ ID NO: 8550 - DNA, 15 bp, synthetic construct
  source 1..15: mol_type = other DNA
tatacacagcattca

SEQ ID NO: 8551 - DNA, 15 bp, synthetic construct
  source 1..15: mol_type = other DNA
agcgttcgcctttct

SEQ ID NO: 8552 - DNA, 15 bp, synthetic construct
  source 1..15: mol_type = other DNA
catgttgtatagcag

SEQ ID NO: 8553 - DNA, 15 bp, synthetic construct
  source 1..15: mol_type = other DNA
ttccaactgcagaaa

SEQ ID NO: 8554 - DNA, 15 bp, synthetic construct
  source 1..15: mol_type = other DNA
ccgacaggctgtttt

SEQ ID NO: 8555 - DNA, 15 bp, synthetic construct
  source 1..15: mol_type = other DNA
ggcgtgggcttggtt

SEQ ID NO: 8556 - DNA, 15 bp, synthetic construct
  source 1..15: mol_type = other DNA
aggtccattcaactt

SEQ ID NO: 8557 - DNA, 15 bp, synthetic construct
  source 1..15: mol_type = other DNA
tgaaggctttcatgc

SEQ ID NO: 8558 - DNA, 15 bp, synthetic construct
  source 1..15: mol_type = other DNA
aacgttttcgctccc

SEQ ID NO: 8559 - DNA, 15 bp, synthetic construct
  source 1..15: mol_type = other DNA
atgcagaaatagaca

SEQ ID NO: 8560 - DNA, 15 bp, synthetic construct
  source 1..15: mol_type = other DNA
aacccttcatacacc

SEQ ID NO: 8561 - DNA, 15 bp, synthetic construct
  source 1..15: mol_type = other DNA
gtttcttggagagtt

SEQ ID NO: 8562 - DNA, 15 bp, synthetic construct
  source 1..15: mol_type = other DNA
gtgaaacacttgaag

SEQ ID NO: 8563 - DNA, 15 bp, synthetic construct
  source 1..15: mol_type = other DNA
tggtctgtgagatga

SEQ ID NO: 8564 - DNA, 15 bp, synthetic construct
  source 1..15: mol_type = other DNA
agatcaggcagatgt

SEQ ID NO: 8565 - DNA, 15 bp, synthetic construct
  source 1..15: mol_type = other DNA
ttgtcctgttcactg

SEQ ID NO: 8566 - DNA, 15 bp, synthetic construct
  source 1..15: mol_type = other DNA
aacctcagtttctta

SEQ ID NO: 8567 - DNA, 15 bp, synthetic construct
  source 1..15: mol_type = other DNA
ggactgagggatttg

SEQ ID NO: 8568 - DNA, 15 bp, synthetic construct
  source 1..15: mol_type = other DNA
ttccttttgccctct

SEQ ID NO: 8569 - DNA, 15 bp, synthetic construct
  source 1..15: mol_type = other DNA
gcactgaaagacgct

SEQ ID NO: 8570 - DNA, 15 bp, synthetic construct
  source 1..15: mol_type = other DNA
tagaccagtttttcc

SEQ ID NO: 8571 - DNA, 15 bp, synthetic construct
  source 1..15: mol_type = other DNA
cagagcatcttataa

SEQ ID NO: 8572 - DNA, 15 bp, synthetic construct
  source 1..15: mol_type = other DNA
actgcaattttcgga

SEQ ID NO: 8573 - DNA, 15 bp, synthetic construct
  source 1..15: mol_type = other DNA
aaacacagaactatg

SEQ ID NO: 8574 - DNA, 15 bp, synthetic construct
  source 1..15: mol_type = other DNA
ctttttcttccagtt

SEQ ID NO: 8575 - DNA, 15 bp, synthetic construct
  source 1..15: mol_type = other DNA
ttagtcacgatttgc

SEQ ID NO: 8576 - DNA, 15 bp, synthetic construct
  source 1..15: mol_type = other DNA
aggaagctaaagaag

SEQ ID NO: 8577 - DNA, 15 bp, synthetic construct
  source 1..15: mol_type = other DNA
aacagcgcctttagc

SEQ ID NO: 8578 - DNA, 15 bp, synthetic construct
  source 1..15: mol_type = other DNA
ctcattggcttcctt

SEQ ID NO: 8579 - DNA, 15 bp, synthetic construct
  source 1..15: mol_type = other DNA
ttcagcttgcatgca

SEQ ID NO: 8580 - DNA, 15 bp, synthetic construct
  source 1..15: mol_type = other DNA
acacatatgccatgg

SEQ ID NO: 8581 - DNA, 15 bp, synthetic construct
  source 1..15: mol_type = other DNA
tagacgtgcaaggcg

SEQ ID NO: 8582 - DNA, 15 bp, synthetic construct
  source 1..15: mol_type = other DNA
gtggatttggcagag

SEQ ID NO: 8583 - DNA, 15 bp, synthetic construct
  source 1..15: mol_type = other DNA
gcagcccggaaacac

SEQ ID NO: 8584 - DNA, 15 bp, synthetic construct
  source 1..15: mol_type = other DNA
ctgatcaggtccaaa

SEQ ID NO: 8585 - DNA, 15 bp, synthetic construct
  source 1..15: mol_type = other DNA
ggatcttgcttaggt

SEQ ID NO: 8586 - DNA, 15 bp, synthetic construct
  source 1..15: mol_type = other DNA
gaaaagagttccatt

SEQ ID NO: 8587 - DNA, 15 bp, synthetic construct
  source 1..15: mol_type = other DNA
gatgagttcatgtat

SEQ ID NO: 8588 - DNA, 15 bp, synthetic construct
  source 1..15: mol_type = other DNA
ggcaggacaaccatt

SEQ ID NO: 8589 - DNA, 15 bp, synthetic construct
  source 1..15: mol_type = other DNA
taaagccttgtaatc

SEQ ID NO: 8590 - DNA, 15 bp, synthetic construct
  source 1..15: mol_type = other DNA
gcagtaacagccaag

SEQ ID NO: 8591 - DNA, 15 bp, synthetic construct
  source 1..15: mol_type = other DNA
cagttgtcaacaata

SEQ ID NO: 8592 - DNA, 15 bp, synthetic construct
  source 1..15: mol_type = other DNA
cttgacattcatgtc

SEQ ID NO: 8593 - DNA, 15 bp, synthetic construct
  source 1..15: mol_type = other DNA
agggtcacctgacac

SEQ ID NO: 8594 - DNA, 15 bp, synthetic construct
  source 1..15: mol_type = other DNA
agcatctgactcctt

SEQ ID NO: 8595 - DNA, 15 bp, synthetic construct
  source 1..15: mol_type = other DNA
gattgcaggcatatt

SEQ ID NO: 8596 - DNA, 15 bp, synthetic construct
  source 1..15: mol_type = other DNA
gaggttcgcttctga

SEQ ID NO: 8597 - DNA, 15 bp, synthetic construct
  source 1..15: mol_type = other DNA
agacacattgacatg

SEQ ID NO: 8598 - DNA, 15 bp, synthetic construct
  source 1..15: mol_type = other DNA
ggtcacggtcagtgc

SEQ ID NO: 8599 - DNA, 15 bp, synthetic construct
  source 1..15: mol_type = other DNA
atgtctgaaagggct

SEQ ID NO: 8600 - DNA, 15 bp, synthetic construct
  source 1..15: mol_type = other DNA
tcacggacttgccgg

SEQ ID NO: 8601 - DNA, 15 bp, synthetic construct
  source 1..15: mol_type = other DNA
gccacgcgcagtatg

SEQ ID NO: 8602 - DNA, 15 bp, synthetic construct
  source 1..15: mol_type = other DNA
tgaacagcgctcttc

SEQ ID NO: 8603 - DNA, 15 bp, synthetic construct
  source 1..15: mol_type = other DNA
caggagaaggtgtcc

SEQ ID NO: 8604 - DNA, 15 bp, synthetic construct
  source 1..15: mol_type = other DNA
cagtgcaagtgaagg

SEQ ID NO: 8605 - DNA, 15 bp, synthetic construct
  source 1..15: mol_type = other DNA
cgggatgcccaagtc

SEQ ID NO: 8606 - DNA, 15 bp, synthetic construct
  source 1..15: mol_type = other DNA
gcacagtcacatcct

SEQ ID NO: 8607 - DNA, 15 bp, synthetic construct
  source 1..15: mol_type = other DNA
gcggtcgatggtctt

SEQ ID NO: 8608 - DNA, 15 bp, synthetic construct
  source 1..15: mol_type = other DNA
agtagctgtcccgtc

SEQ ID NO: 8609 - DNA, 15 bp, synthetic construct
  source 1..15: mol_type = other DNA
atgaaagtgacaatg

SEQ ID NO: 8610 - DNA, 15 bp, synthetic construct
  source 1..15: mol_type = other DNA
acccagaagtgttca

SEQ ID NO: 8611 - DNA, 15 bp, synthetic construct
  source 1..15: mol_type = other DNA
ccctgatatgatggg

SEQ ID NO: 8612 - DNA, 15 bp, synthetic construct
  source 1..15: mol_type = other DNA
cagcggaagatctcc

SEQ ID NO: 8613 - DNA, 15 bp, synthetic construct
  source 1..15: mol_type = other DNA
ggtctagaagactgg

SEQ ID NO: 8614 - DNA, 15 bp, synthetic construct
  source 1..15: mol_type = other DNA
gacgttgggtggtac

SEQ ID NO: 8615 - DNA, 15 bp, synthetic construct
  source 1..15: mol_type = other DNA
agggccacaaacgtg

SEQ ID NO: 8616 - DNA, 15 bp, synthetic construct
  source 1..15: mol_type = other DNA
ctggaccacgcattt

SEQ ID NO: 8617 - DNA, 15 bp, synthetic construct
  source 1..15: mol_type = other DNA
ccacatcatcaaagg

SEQ ID NO: 8618 - DNA, 15 bp, synthetic construct
  source 1..15: mol_type = other DNA
ggatggttcagtgtg

SEQ ID NO: 8619 - DNA, 15 bp, synthetic construct
  source 1..15: mol_type = other DNA
cacggtacgtgctgt

SEQ ID NO: 8620 - DNA, 15 bp, synthetic construct
  source 1..15: mol_type = other DNA
gagatcatgagggtg

SEQ ID NO: 8621 - DNA, 15 bp, synthetic construct
  source 1..15: mol_type = other DNA
ctgagtgatctcggt

SEQ ID NO: 8622 - DNA, 15 bp, synthetic construct
  source 1..15: mol_type = other DNA
cctcattcctcatgt

SEQ ID NO: 8623 - DNA, 15 bp, synthetic construct
  source 1..15: mol_type = other DNA
tagtggttgtgcaga

SEQ ID NO: 8624 - DNA, 15 bp, synthetic construct
  source 1..15: mol_type = other DNA
ggaggcgtggtcttg

SEQ ID NO: 8625 - DNA, 15 bp, synthetic construct
  source 1..15: mol_type = other DNA
tgggtgctttatttc

SEQ ID NO: 8626 - DNA, 15 bp, synthetic construct
  source 1..15: mol_type = other DNA
aagctgaaatggtgg

SEQ ID NO: 8627 - DNA, 15 bp, synthetic construct
  source 1..15: mol_type = other DNA
cacctgctcttgtcc

SEQ ID NO: 8628 - DNA, 15 bp, synthetic construct
  source 1..15: mol_type = other DNA
gctttgttggagacc

SEQ ID NO: 8629 - DNA, 15 bp, synthetic construct
  source 1..15: mol_type = other DNA
cacggcgatgtcgct

SEQ ID NO: 8630 - DNA, 15 bp, synthetic construct
  source 1..15: mol_type = other DNA
ttcgcaagaacacgg

SEQ ID NO: 8631 - DNA, 15 bp, synthetic construct
  source 1..15: mol_type = other DNA
gcttgtgattcacgt

SEQ ID NO: 8632 - DNA, 15 bp, synthetic construct
  source 1..15: mol_type = other DNA
gcggctttgtcttgg

SEQ ID NO: 8633 - DNA, 15 bp, synthetic construct
  source 1..15: mol_type = other DNA
ccactcaccatctgg

SEQ ID NO: 8634 - DNA, 15 bp, synthetic construct
  source 1..15: mol_type = other DNA
aagtatgtacacggg

SEQ ID NO: 8635 - DNA, 15 bp, synthetic construct
  source 1..15: mol_type = other DNA
gcactgtagcacacg

SEQ ID NO: 8636 - DNA, 15 bp, synthetic construct
  source 1..15: mol_type = other DNA
tgaagatggtgatgg

SEQ ID NO: 8637 - DNA, 15 bp, synthetic construct
  source 1..15: mol_type = other DNA
cgtctgagtgagcct

SEQ ID NO: 8638 - DNA, 15 bp, synthetic construct
  source 1..15: mol_type = other DNA
cgggtccagttccac

SEQ ID NO: 8639 - DNA, 15 bp, synthetic construct
  source 1..15: mol_type = other DNA
cctgagttccacgac

SEQ ID NO: 8640 - DNA, 15 bp, synthetic construct
  source 1..15: mol_type = other DNA
agttgaacttgacct

SEQ ID NO: 8641 - DNA, 15 bp, synthetic construct
  source 1..15: mol_type = other DNA
cctgtctgcagattc

SEQ ID NO: 8642 - DNA, 15 bp, synthetic construct
  source 1..15: mol_type = other DNA
ggcactcatttaccc

SEQ ID NO: 8643 - DNA, 15 bp, synthetic construct
  source 1..15: mol_type = other DNA
cgctgtcataggtgg

SEQ ID NO: 8644 - DNA, 15 bp, synthetic construct
  source 1..15: mol_type = other DNA
tgaacaaggtgacgg

SEQ ID NO: 8645 - DNA, 15 bp, synthetic construct
  source 1..15: mol_type = other DNA
aacaagcgtatacac

SEQ ID NO: 8646 - DNA, 15 bp, synthetic construct
  source 1..15: mol_type = other DNA
tgctgatgtcagagt

SEQ ID NO: 8647 - DNA, 15 bp, synthetic construct
  source 1..15: mol_type = other DNA
ggagatgttggtgtg

SEQ ID NO: 8648 - DNA, 15 bp, synthetic construct
  source 1..15: mol_type = other DNA
tccattcctcttcgg

SEQ ID NO: 8649 - DNA, 15 bp, synthetic construct
  source 1..15: mol_type = other DNA
cctgaatctgccggg

SEQ ID NO: 8650 - DNA, 15 bp, synthetic construct
  source 1..15: mol_type = other DNA
cccggaattccagtc

SEQ ID NO: 8651 - DNA, 15 bp, synthetic construct
  source 1..15: mol_type = other DNA
ttgtacagggtgggt

SEQ ID NO: 8652 - DNA, 15 bp, synthetic construct
  source 1..15: mol_type = other DNA
ctggactttgcacac

SEQ ID NO: 8653 - DNA, 15 bp, synthetic construct
  source 1..15: mol_type = other DNA
gctcgtatccgacgg

SEQ ID NO: 8654 - DNA, 15 bp, synthetic construct
  source 1..15: mol_type = other DNA
agagaaacacgtgcc

SEQ ID NO: 8655 - DNA, 15 bp, synthetic construct
  source 1..15: mol_type = other DNA
agcttggacttgcgg

SEQ ID NO: 8656 - DNA, 15 bp, synthetic construct
  source 1..15: mol_type = other DNA
aagtgatggagtcgg

SEQ ID NO: 8657 - DNA, 15 bp, synthetic construct
  source 1..15: mol_type = other DNA
ggtcgagaaggaagc

SEQ ID NO: 8658 - DNA, 15 bp, synthetic construct
  source 1..15: mol_type = other DNA
gccagtcgctctctt

SEQ ID NO: 8659 - DNA, 15 bp, synthetic construct
  source 1..15: mol_type = other DNA
ggaagaggcacgttc

SEQ ID NO: 8660 - DNA, 15 bp, synthetic construct
  source 1..15: mol_type = other DNA
cccgttgacacggtt

SEQ ID NO: 8661 - DNA, 15 bp, synthetic construct
  source 1..15: mol_type = other DNA
ctagcttaagaggac

SEQ ID NO: 8662 - DNA, 15 bp, synthetic construct
  source 1..15: mol_type = other DNA
agggtacaccagtgc

SEQ ID NO: 8663 - DNA, 15 bp, synthetic construct
  source 1..15: mol_type = other DNA
aagcttcttatatgc

SEQ ID NO: 8664 - DNA, 15 bp, synthetic construct
  source 1..15: mol_type = other DNA
agtgtgtcaccctat

SEQ ID NO: 8665 - DNA, 15 bp, synthetic construct
  source 1..15: mol_type = other DNA
agtgacatcaggact

SEQ ID NO: 8666 - DNA, 15 bp, synthetic construct
  source 1..15: mol_type = other DNA
tcagacaaggcttgg

SEQ ID NO: 8667 - DNA, 15 bp, synthetic construct
  source 1..15: mol_type = other DNA
cttctttctaaatcg

SEQ ID NO: 8668 - DNA, 15 bp, synthetic construct
  source 1..15: mol_type = other DNA
tgggtgcagctgttc

SEQ ID NO: 8669 - DNA, 15 bp, synthetic construct
  source 1..15: mol_type = other DNA
caggtaaaactggat

SEQ ID NO: 8670 - DNA, 15 bp, synthetic construct
  source 1..15: mol_type = other DNA
ggaaaacagctcaac

SEQ ID NO: 8671 - DNA, 15 bp, synthetic construct
  source 1..15: mol_type = other DNA
ctccttgctaactta

SEQ ID NO: 8672 - DNA, 15 bp, synthetic construct
  source 1..15: mol_type = other DNA
atctccagcacatag

SEQ ID NO: 8673 - DNA, 15 bp, synthetic construct
  source 1..15: mol_type = other DNA
gagttcacatgcgcc

SEQ ID NO: 8674 - DNA, 15 bp, synthetic construct
  source 1..15: mol_type = other DNA
tgtgcatgccttctt

SEQ ID NO: 8675 - DNA, 15 bp, synthetic construct
  source 1..15: mol_type = other DNA
ctcattcgcgtgttc

SEQ ID NO: 8676 - DNA, 15 bp, synthetic construct
  source 1..15: mol_type = other DNA
tttgcaagagcaagc

SEQ ID NO: 8677 - DNA, 15 bp, synthetic construct
  source 1..15: mol_type = other DNA
agacttagactggct

SEQ ID NO: 8678 - DNA, 15 bp, synthetic construct
  source 1..15: mol_type = other DNA
agccaaaggtgagtg

SEQ ID NO: 8679 - DNA, 15 bp, synthetic construct
  source 1..15: mol_type = other DNA
ccctccgagacactg

SEQ ID NO: 8680 - DNA, 15 bp, synthetic construct
  source 1..15: mol_type = other DNA
tcctagagtctatag

SEQ ID NO: 8681 - DNA, 15 bp, synthetic construct
  source 1..15: mol_type = other DNA
cctccagcaaggact

SEQ ID NO: 8682 - DNA, 15 bp, synthetic construct
  source 1..15: mol_type = other DNA
tcactctgctgaagg

SEQ ID NO: 8683 - DNA, 15 bp, synthetic construct
  source 1..15: mol_type = other DNA
gaatgaagtggttgg

SEQ ID NO: 8684 - DNA, 15 bp, synthetic construct
  source 1..15: mol_type = other DNA
tacagtacaggcggg

SEQ ID NO: 8685 - DNA, 15 bp, synthetic construct
  source 1..15: mol_type = other DNA
tgggtagcttctttc

SEQ ID NO: 8686 - DNA, 15 bp, synthetic construct
  source 1..15: mol_type = other DNA
agctagaatttcggg

SEQ ID NO: 8687 - DNA, 15 bp, synthetic construct
  source 1..15: mol_type = other DNA
gaacctcacatccct

SEQ ID NO: 8688 - DNA, 15 bp, synthetic construct
  source 1..15: mol_type = other DNA
tcctcatcaagcggg

SEQ ID NO: 8689 - DNA, 15 bp, synthetic construct
  source 1..15: mol_type = other DNA
agcgacagatggttt

SEQ ID NO: 8690 - DNA, 15 bp, synthetic construct
  source 1..15: mol_type = other DNA
aaggcaaagaagatg

SEQ ID NO: 8691 - DNA, 15 bp, synthetic construct
  source 1..15: mol_type = other DNA
tgtgtcatttgcggg

SEQ ID NO: 8692 - DNA, 15 bp, synthetic construct
  source 1..15: mol_type = other DNA
ctgatactgtcttgg

SEQ ID NO: 8693 - DNA, 15 bp, synthetic construct
  source 1..15: mol_type = other DNA
gcgccacttcatagc

SEQ ID NO: 8694 - DNA, 15 bp, synthetic construct
  source 1..15: mol_type = other DNA
cccgaggatgaagcc

SEQ ID NO: 8695 - DNA, 15 bp, synthetic construct
  source 1..15: mol_type = other DNA
ggtgttggtgacggt

SEQ ID NO: 8696 - DNA, 15 bp, synthetic construct
  source 1..15: mol_type = other DNA
cctgtggactgaact

SEQ ID NO: 8697 - DNA, 15 bp, synthetic construct
  source 1..15: mol_type = other DNA
gacaagtggctagtc

SEQ ID NO: 8698 - DNA, 15 bp, synthetic construct
  source 1..15: mol_type = other DNA
cagcagcactacgag

SEQ ID NO: 8699 - DNA, 15 bp, synthetic construct
  source 1..15: mol_type = other DNA
actctcggaagtgac

SEQ ID NO: 8700 - DNA, 15 bp, synthetic construct
  source 1..15: mol_type = other DNA
tggatctgttagcct

SEQ ID NO: 8701 - DNA, 15 bp, synthetic construct
  source 1..15: mol_type = other DNA
ggatgtggtggaaaa

SEQ ID NO: 8702 - DNA, 15 bp, synthetic construct
  source 1..15: mol_type = other DNA
cgtgaagtttcccgg

SEQ ID NO: 8703 - DNA, 15 bp, synthetic construct
  source 1..15: mol_type = other DNA
tagaggatcctgttt

SEQ ID NO: 8704 - DNA, 15 bp, synthetic construct
  source 1..15: mol_type = other DNA
accattcctcagtgg

SEQ ID NO: 8705 - DNA, 15 bp, synthetic construct
  source 1..15: mol_type = other DNA
ggtcactgcggtaag

SEQ ID NO: 8706 - DNA, 15 bp, synthetic construct
  source 1..15: mol_type = other DNA
gttggagatggagtt

SEQ ID NO: 8707 - DNA, 15 bp, synthetic construct
  source 1..15: mol_type = other DNA
cagagttttgaacta

SEQ ID NO: 8708 - DNA, 15 bp, synthetic construct
  source 1..15: mol_type = other DNA
gccatctgtcaaggg

SEQ ID NO: 8709 - DNA, 15 bp, synthetic construct
  source 1..15: mol_type = other DNA
ggatgttcaggttga

SEQ ID NO: 8710 - DNA, 15 bp, synthetic construct
  source 1..15: mol_type = other DNA
cttaatctccaaagg

SEQ ID NO: 8711 - DNA, 15 bp, synthetic construct
  source 1..15: mol_type = other DNA
gggacagagttcatg

SEQ ID NO: 8712 - DNA, 15 bp, synthetic construct
  source 1..15: mol_type = other DNA
tcagtcaaaccttcc

SEQ ID NO: 8713 - DNA, 15 bp, synthetic construct
  source 1..15: mol_type = other DNA
cctggatttcgtggg

SEQ ID NO: 8714 - DNA, 15 bp, synthetic construct
  source 1..15: mol_type = other DNA
tcccagatcacagag

SEQ ID NO: 8715 - DNA, 15 bp, synthetic construct
  source 1..15: mol_type = other DNA
cttctgtctacagca

SEQ ID NO: 8716 - DNA, 15 bp, synthetic construct
  source 1..15: mol_type = other DNA
ccaatgaggtcttcc

SEQ ID NO: 8717 - DNA, 15 bp, synthetic construct
  source 1..15: mol_type = other DNA
tggacaaactgcctt

SEQ ID NO: 8718 - DNA, 15 bp, synthetic construct
  source 1..15: mol_type = other DNA
tggtggacaatcggg

SEQ ID NO: 8719 - DNA, 15 bp, synthetic construct
  source 1..15: mol_type = other DNA
ggatgagtttgtgcc

SEQ ID NO: 8720 - DNA, 15 bp, synthetic construct
  source 1..15: mol_type = other DNA
cagggccattatctt

SEQ ID NO: 8721 - DNA, 15 bp, synthetic construct
  source 1..15: mol_type = other DNA
cagatctcatatctt

SEQ ID NO: 8722 - DNA, 15 bp, synthetic construct
  source 1..15: mol_type = other DNA
ggtggatcggttgta

SEQ ID NO: 8723 - DNA, 15 bp, synthetic construct
  source 1..15: mol_type = other DNA
cctaggagtgttgct

SEQ ID NO: 8724 - DNA, 15 bp, synthetic construct
  source 1..15: mol_type = other DNA
gagaacttggaattt

SEQ ID NO: 8725 - DNA, 15 bp, synthetic construct
  source 1..15: mol_type = other DNA
agtcggtgttcagtc

SEQ ID NO: 8726 - DNA, 15 bp, synthetic construct
  source 1..15: mol_type = other DNA
gcataactcttccca

SEQ ID NO: 8727 - DNA, 15 bp, synthetic construct
  source 1..15: mol_type = other DNA
tgaagacaatgtctc

SEQ ID NO: 8728 - DNA, 15 bp, synthetic construct
  source 1..15: mol_type = other DNA
gagcaatgaagattg

SEQ ID NO: 8729 - DNA, 15 bp, synthetic construct
  source 1..15: mol_type = other DNA
tctccttgtacaaag

SEQ ID NO: 8730 - DNA, 15 bp, synthetic construct
  source 1..15: mol_type = other DNA
gctgttagataagca

SEQ ID NO: 8731 - DNA, 15 bp, synthetic construct
  source 1..15: mol_type = other DNA
tgcatcgtgcacata

SEQ ID NO: 8732 - DNA, 15 bp, synthetic construct
  source 1..15: mol_type = other DNA
ggagagctttcagtt

SEQ ID NO: 8733 - DNA, 15 bp, synthetic construct
  source 1..15: mol_type = other DNA
ggtttggtatctgcc

SEQ ID NO: 8734 - DNA, 15 bp, synthetic construct
  source 1..15: mol_type = other DNA
cccgagtcataagca

SEQ ID NO: 8735 - DNA, 15 bp, synthetic construct
  source 1..15: mol_type = other DNA
tgggcattggtgtag

SEQ ID NO: 8736 - DNA, 15 bp, synthetic construct
  source 1..15: mol_type = other DNA
cttcatctgtttagg

SEQ ID NO: 8737 - DNA, 15 bp, synthetic construct
  source 1..15: mol_type = other DNA
tgaatgtgtgaaaga

SEQ ID NO: 8738 - DNA, 15 bp, synthetic construct
  source 1..15: mol_type = other DNA
gagacagagagactc

SEQ ID NO: 8739 - DNA, 15 bp, synthetic construct
  source 1..15: mol_type = other DNA
tcagttcatatggac

SEQ ID NO: 8740 - DNA, 15 bp, synthetic construct
  source 1..15: mol_type = other DNA
cggagattcgtagct

SEQ ID NO: 8741 - DNA, 15 bp, synthetic construct
  source 1..15: mol_type = other DNA
ctgtaataagccatc

SEQ ID NO: 8742 - DNA, 15 bp, synthetic construct
  source 1..15: mol_type = other DNA
gctcttttacagaca

SEQ ID NO: 8743 - DNA, 15 bp, synthetic construct
  source 1..15: mol_type = other DNA
gtggtttctgtcagg

SEQ ID NO: 8744 - DNA, 15 bp, synthetic construct
  source 1..15: mol_type = other DNA
gagtgggcttatcat

SEQ ID NO: 8745 - DNA, 15 bp, synthetic construct
  source 1..15: mol_type = other DNA
ctgttgtgccttgtg

SEQ ID NO: 8746 - DNA, 15 bp, synthetic construct
  source 1..15: mol_type = other DNA
ggagcgtgcagttca

SEQ ID NO: 8747 - DNA, 15 bp, synthetic construct
  source 1..15: mol_type = other DNA
gaagacgggcatgtt

SEQ ID NO: 8748 - DNA, 15 bp, synthetic construct
  source 1..15: mol_type = other DNA
cagcttgtccatggc

SEQ ID NO: 8749 - DNA, 15 bp, synthetic construct
  source 1..15: mol_type = other DNA
gctgcttcagacacc

SEQ ID NO: 8750 - DNA, 15 bp, synthetic construct
  source 1..15: mol_type = other DNA
aggagatcctcttag

SEQ ID NO: 8751 - DNA, 15 bp, synthetic construct
  source 1..15: mol_type = other DNA
agaatgtgggagcga

SEQ ID NO: 8752 - DNA, 15 bp, synthetic construct
  source 1..15: mol_type = other DNA
catcagcaggtatga

SEQ ID NO: 8753 - DNA, 15 bp, synthetic construct
  source 1..15: mol_type = other DNA
gagttgctctcttta

SEQ ID NO: 8754 - DNA, 15 bp, synthetic construct
  source 1..15: mol_type = other DNA
ggttgaggtgtcact

SEQ ID NO: 8755 - DNA, 15 bp, synthetic construct
  source 1..15: mol_type = other DNA
tgcacagatgagtct

SEQ ID NO: 8756 - DNA, 15 bp, synthetic construct
  source 1..15: mol_type = other DNA
tgttgttgtgacgag

SEQ ID NO: 8757 - DNA, 15 bp, synthetic construct
  source 1..15: mol_type = other DNA
ctggctgcattggac

SEQ ID NO: 8758 - DNA, 15 bp, synthetic construct
  source 1..15: mol_type = other DNA
cacccttgtgggtcc

SEQ ID NO: 8759 - DNA, 15 bp, synthetic construct
  source 1..15: mol_type = other DNA
caatgtccagttgta

SEQ ID NO: 8760 - DNA, 15 bp, synthetic construct
  source 1..15: mol_type = other DNA
cccgtgggtcatttt

SEQ ID NO: 8761 - DNA, 15 bp, synthetic construct
  source 1..15: mol_type = other DNA
aggacgctgatcagc

SEQ ID NO: 8762 - DNA, 15 bp, synthetic construct
  source 1..15: mol_type = other DNA
tttgaatgtggcgtg

SEQ ID NO: 8763 - DNA, 15 bp, synthetic construct
  source 1..15: mol_type = other DNA
ttattaggcaacgtg

SEQ ID NO: 8764 - DNA, 15 bp, synthetic construct
  source 1..15: mol_type = other DNA
gttgtaaatatggac

SEQ ID NO: 8765 - DNA, 15 bp, synthetic construct
  source 1..15: mol_type = other DNA
cctctgtgtagagcc

SEQ ID NO: 8766 - DNA, 15 bp, synthetic construct
  source 1..15: mol_type = other DNA
ggctagagtttcctg

SEQ ID NO: 8767 - DNA, 15 bp, synthetic construct
  source 1..15: mol_type = other DNA
cacaatggttctcaa

SEQ ID NO: 8768 - DNA, 15 bp, synthetic construct
  source 1..15: mol_type = other DNA
gacccgctttttatt

SEQ ID NO: 8769 - DNA, 15 bp, synthetic construct
  source 1..15: mol_type = other DNA
acagttcaacatggt

SEQ ID NO: 8770 - DNA, 15 bp, synthetic construct
  source 1..15: mol_type = other DNA
agctctggaagttga

SEQ ID NO: 8771 - DNA, 15 bp, synthetic construct
  source 1..15: mol_type = other DNA
tgctggtatgctcat

SEQ ID NO: 8772 - DNA, 15 bp, synthetic construct
  source 1..15: mol_type = other DNA
cttgtgcattgacat

SEQ ID NO: 8773 - DNA, 15 bp, synthetic construct
  source 1..15: mol_type = other DNA
caccacgaaatgata

SEQ ID NO: 8774 - DNA, 15 bp, synthetic construct
  source 1..15: mol_type = other DNA
caactgattcgtgag

SEQ ID NO: 8775 - DNA, 15 bp, synthetic construct
  source 1..15: mol_type = other DNA
caggaaacgtacgca

SEQ ID NO: 8776 - DNA, 15 bp, synthetic construct
  source 1..15: mol_type = other DNA
ctcgaactccaggtg

SEQ ID NO: 8777 - DNA, 15 bp, synthetic construct
  source 1..15: mol_type = other DNA
agatgttggctctcg

SEQ ID NO: 8778 - DNA, 15 bp, synthetic construct
  source 1..15: mol_type = other DNA
ctgcgtgtgtccaaa

SEQ ID NO: 8779 - DNA, 15 bp, synthetic construct
  source 1..15: mol_type = other DNA
acaggaatcctgacc

SEQ ID NO: 8780 - DNA, 15 bp, synthetic construct
  source 1..15: mol_type = other DNA
ttcccagcttatgtt

SEQ ID NO: 8781 - DNA, 15 bp, synthetic construct
  source 1..15: mol_type = other DNA
tggtgccaggtaatt

SEQ ID NO: 8782 - DNA, 15 bp, synthetic construct
  source 1..15: mol_type = other DNA
tcacaggtttggttc

SEQ ID NO: 8783 - DNA, 15 bp, synthetic construct
  source 1..15: mol_type = other DNA
gcttagtggctcaac

SEQ ID NO: 8784 - DNA, 15 bp, synthetic construct
  source 1..15: mol_type = other DNA
gggtgacgatgtcaa

SEQ ID NO: 8785 - DNA, 15 bp, synthetic construct
  source 1..15: mol_type = other DNA
cgaggactgatattg

SEQ ID NO: 8786 - DNA, 15 bp, synthetic construct
  source 1..15: mol_type = other DNA
gattagtaggttgcc

SEQ ID NO: 8787 - DNA, 15 bp, synthetic construct
  source 1..15: mol_type = other DNA
agttcaaacgcccaa

SEQ ID NO: 8788 - DNA, 15 bp, synthetic construct
  source 1..15: mol_type = other DNA
ctgcagttgatcagc

SEQ ID NO: 8789 - DNA, 15 bp, synthetic construct
  source 1..15: mol_type = other DNA
ttctcttgtgggtct

SEQ ID NO: 8790 - DNA, 15 bp, synthetic construct
  source 1..15: mol_type = other DNA
ctcgccttgcagagg

SEQ ID NO: 8791 - DNA, 15 bp, synthetic construct
  source 1..15: mol_type = other DNA
aagacttgctgaagg

SEQ ID NO: 8792 - DNA, 15 bp, synthetic construct
  source 1..15: mol_type = other DNA
ggcaggcgagcatta

SEQ ID NO: 8793 - DNA, 15 bp, synthetic construct
  source 1..15: mol_type = other DNA
tggccatatttgggt

SEQ ID NO: 8794 - DNA, 15 bp, synthetic construct
  source 1..15: mol_type = other DNA
ccctggagttcttgg

SEQ ID NO: 8795 - DNA, 15 bp, synthetic construct
  source 1..15: mol_type = other DNA
tcttcctctgagtag

SEQ ID NO: 8796 - DNA, 15 bp, synthetic construct
  source 1..15: mol_type = other DNA
caggaaaccgacact

SEQ ID NO: 8797 - DNA, 15 bp, synthetic construct
  source 1..15: mol_type = other DNA
cactgtacaacagtg

SEQ ID NO: 8798 - DNA, 15 bp, synthetic construct
  source 1..15: mol_type = other DNA
agcagtaggtatttt

SEQ ID NO: 8799 - DNA, 15 bp, synthetic construct
  source 1..15: mol_type = other DNA
agaagaagtaaccct

SEQ ID NO: 8800 - DNA, 15 bp, synthetic construct
  source 1..15: mol_type = other DNA
aagcatccatctttt

SEQ ID NO: 8801 - DNA, 15 bp, synthetic construct
  source 1..15: mol_type = other DNA
ttgtttgtcaattcg

SEQ ID NO: 8802 - DNA, 15 bp, synthetic construct
  source 1..15: mol_type = other DNA
cccattaacaacaac

SEQ ID NO: 8803 - DNA, 15 bp, synthetic construct
  source 1..15: mol_type = other DNA
tgtcctaacgctcat

SEQ ID NO: 8804 - DNA, 15 bp, synthetic construct
  source 1..15: mol_type = other DNA
gaagctagaaggaaa

SEQ ID NO: 8805 - DNA, 15 bp, synthetic construct
  source 1..15: mol_type = other DNA
tcagacatctccagt

SEQ ID NO: 8806 - DNA, 15 bp, synthetic construct
  source 1..15: mol_type = other DNA
gtagccttctctttt

SEQ ID NO: 8807 - DNA, 15 bp, synthetic construct
  source 1..15: mol_type = other DNA
cagtggacaggtttc

SEQ ID NO: 8808 - DNA, 15 bp, synthetic construct
  source 1..15: mol_type = other DNA
tacttgtggagaagg

SEQ ID NO: 8809 - DNA, 15 bp, synthetic construct
  source 1..15: mol_type = other DNA
ctacactttccaaga

SEQ ID NO: 8810 - DNA, 15 bp, synthetic construct
  source 1..15: mol_type = other DNA
caaatgggctctaga

SEQ ID NO: 8811 - DNA, 15 bp, synthetic construct
  source 1..15: mol_type = other DNA
cagacccttgcacaa

SEQ ID NO: 8812 - DNA, 15 bp, synthetic construct
  source 1..15: mol_type = other DNA
tgtggcatcttgcag

SEQ ID NO: 8813 - DNA, 15 bp, synthetic construct
  source 1..15: mol_type = other DNA
ggaactccttaaagc

SEQ ID NO: 8814 - DNA, 15 bp, synthetic construct
  source 1..15: mol_type = other DNA
ccagtgcctctttgc

SEQ ID NO: 8815 - DNA, 15 bp, synthetic construct
  source 1..15: mol_type = other DNA
ggagatagagcttct

SEQ ID NO: 8816 - DNA, 15 bp, synthetic construct
  source 1..15: mol_type = other DNA
cccacctttttctgc

SEQ ID NO: 8817 - DNA, 15 bp, synthetic construct
  source 1..15: mol_type = other DNA
tcggcacccaagaat

SEQ ID NO: 8818 - DNA, 15 bp, synthetic construct
  source 1..15: mol_type = other DNA
ggaggtactctaggt

SEQ ID NO: 8819 - DNA, 15 bp, synthetic construct
  source 1..15: mol_type = other DNA
ggcttgttcctcact

SEQ ID NO: 8820 - DNA, 15 bp, synthetic construct
  source 1..15: mol_type = other DNA
tctcttttgttctct

SEQ ID NO: 8821 - DNA, 15 bp, synthetic construct
  source 1..15: mol_type = other DNA
ccactttctccagaa

SEQ ID NO: 8822 - DNA, 15 bp, synthetic construct
  source 1..15: mol_type = other DNA
ctccagaagccttta

SEQ ID NO: 8823 - DNA, 15 bp, synthetic construct
  source 1..15: mol_type = other DNA
ctcagattcttctag

SEQ ID NO: 8824 - DNA, 15 bp, synthetic construct
  source 1..15: mol_type = other DNA
gccagtgtgtatgaa

SEQ ID NO: 8825 - DNA, 15 bp, synthetic construct
  source 1..15: mol_type = other DNA
ctctggagttctgaa

SEQ ID NO: 8826 - DNA, 15 bp, synthetic construct
  source 1..15: mol_type = other DNA
caggagtgtcagctt

SEQ ID NO: 8827 - DNA, 15 bp, synthetic construct
  source 1..15: mol_type = other DNA
gaacagcccatactt

SEQ ID NO: 8828 - DNA, 15 bp, synthetic construct
  source 1..15: mol_type = other DNA
caggttagactcttt

SEQ ID NO: 8829 - DNA, 15 bp, synthetic construct
  source 1..15: mol_type = other DNA
gagtaaggcagtaga

SEQ ID NO: 8830 - DNA, 15 bp, synthetic construct
  source 1..15: mol_type = other DNA
tggaaaacaatcttg

SEQ ID NO: 8831 - DNA, 15 bp, synthetic construct
  source 1..15: mol_type = other DNA
tagaagagctaagaa

SEQ ID NO: 8832 - DNA, 15 bp, synthetic construct
  source 1..15: mol_type = other DNA
gggtcctcaaaagca

SEQ ID NO: 8833 - DNA, 15 bp, synthetic construct
  source 1..15: mol_type = other DNA
cacaaagtcattggc

SEQ ID NO: 8834 - DNA, 15 bp, synthetic construct
  source 1..15: mol_type = other DNA
cgaactttaatctca

SEQ ID NO: 8835 - DNA, 15 bp, synthetic construct
  source 1..15: mol_type = other DNA
ctgtaggaaagctaa

SEQ ID NO: 8836 - DNA, 15 bp, synthetic construct
  source 1..15: mol_type = other DNA
gtagtttcctgaaat

SEQ ID NO: 8837 - DNA, 15 bp, synthetic construct
  source 1..15: mol_type = other DNA
cactcaggtcaaaag

SEQ ID NO: 8838 - DNA, 15 bp, synthetic construct
  source 1..15: mol_type = other DNA
ggcattcaagaatta

SEQ ID NO: 8839 - DNA, 15 bp, synthetic construct
  source 1..15: mol_type = other DNA
ctttgtcgctcacgg

SEQ ID NO: 8840 - DNA, 15 bp, synthetic construct
  source 1..15: mol_type = other DNA
tcctggcggtaagct

SEQ ID NO: 8841 - DNA, 15 bp, synthetic construct
  source 1..15: mol_type = other DNA
aaaaaaaagccagcc

SEQ ID NO: 8842 - DNA, 15 bp, synthetic construct
  source 1..15: mol_type = other DNA
aggatgctcttgact

SEQ ID NO: 8843 - DNA, 15 bp, synthetic construct
  source 1..15: mol_type = other DNA
cattgtacgcttata

SEQ ID NO: 8844 - DNA, 15 bp, synthetic construct
  source 1..15: mol_type = other DNA
cctgacgcaaaggcc

SEQ ID NO: 8845 - DNA, 15 bp, synthetic construct
  source 1..15: mol_type = other DNA
cagacctgcttgatg

SEQ ID NO: 8846 - DNA, 15 bp, synthetic construct
  source 1..15: mol_type = other DNA
agccgcacaggtgtt

SEQ ID NO: 8847 - DNA, 15 bp, synthetic construct
  source 1..15: mol_type = other DNA
caagggctttattcc

SEQ ID NO: 8848 - DNA, 15 bp, synthetic construct
  source 1..15: mol_type = other DNA
ggtcttgggtgtgta

SEQ ID NO: 8849 - DNA, 15 bp, synthetic construct
  source 1..15: mol_type = other DNA
gggctgcgtctagtt

SEQ ID NO: 8850 - DNA, 15 bp, synthetic construct
  source 1..15: mol_type = other DNA
cagatgctggtacag

SEQ ID NO: 8851 - DNA, 15 bp, synthetic construct
  source 1..15: mol_type = other DNA
acagctaaagtctcc

SEQ ID NO: 8852 - DNA, 15 bp, synthetic construct
  source 1..15: mol_type = other DNA
gctgagtccatcaga

SEQ ID NO: 8853 - DNA, 15 bp, synthetic construct
  source 1..15: mol_type = other DNA
ctcttagcatctcgg

SEQ ID NO: 8854 - DNA, 15 bp, synthetic construct
  source 1..15: mol_type = other DNA
ggcgggatgccaata

SEQ ID NO: 8855 - DNA, 15 bp, synthetic construct
  source 1..15: mol_type = other DNA
gatgcgcgggacgaa

SEQ ID NO: 8856 - DNA, 15 bp, synthetic construct
  source 1..15: mol_type = other DNA
atgcgcatccgagtg

SEQ ID NO: 8857 - DNA, 15 bp, synthetic construct
  source 1..15: mol_type = other DNA
tgtgtgaatggccca

SEQ ID NO: 8858 - DNA, 15 bp, synthetic construct
  source 1..15: mol_type = other DNA
ctctagaaactggat

SEQ ID NO: 8859 - DNA, 15 bp, synthetic construct
  source 1..15: mol_type = other DNA
tccagtctggaatct

SEQ ID NO: 8860 - DNA, 15 bp, synthetic construct
  source 1..15: mol_type = other DNA
atccttgttgatgtc

SEQ ID NO: 8861 - DNA, 15 bp, synthetic construct
  source 1..15: mol_type = other DNA
catgatgtcctcagg

SEQ ID NO: 8862 - DNA, 15 bp, synthetic construct
  source 1..15: mol_type = other DNA
cagaatcaactgaca

SEQ ID NO: 8863 - DNA, 15 bp, synthetic construct
  source 1..15: mol_type = other DNA
tgcttccatgggatc

SEQ ID NO: 8864 - DNA, 15 bp, synthetic construct
  source 1..15: mol_type = other DNA
gtccggcacaacttc

SEQ ID NO: 8865 - DNA, 15 bp, synthetic construct
  source 1..15: mol_type = other DNA
gggatttggttggaa

SEQ ID NO: 8866 - DNA, 15 bp, synthetic construct
  source 1..15: mol_type = other DNA
ctgacctgatacact

SEQ ID NO: 8867 - DNA, 15 bp, synthetic construct
  source 1..15: mol_type = other DNA
gtgacacctggaagt

SEQ ID NO: 8868 - DNA, 15 bp, synthetic construct
  source 1..15: mol_type = other DNA
catccacgtttgttg

SEQ ID NO: 8869 - DNA, 15 bp, synthetic construct
  source 1..15: mol_type = other DNA
actttccttcacatt

SEQ ID NO: 8870 - DNA, 15 bp, synthetic construct
  source 1..15: mol_type = other DNA
cagcgaaagttggcc

SEQ ID NO: 8871 - DNA, 15 bp, synthetic construct
  source 1..15: mol_type = other DNA
ctgcatgtagcctgg

SEQ ID NO: 8872 - DNA, 15 bp, synthetic construct
  source 1..15: mol_type = other DNA
cgcagtctccgtagg

SEQ ID NO: 8873 - DNA, 15 bp, synthetic construct
  source 1..15: mol_type = other DNA
ccagctgctaggtac

SEQ ID NO: 8874 - DNA, 15 bp, synthetic construct
  source 1..15: mol_type = other DNA
gtcttgcctcgacta

SEQ ID NO: 8875 - DNA, 15 bp, synthetic construct
  source 1..15: mol_type = other DNA
gggaagccttagagt

SEQ ID NO: 8876 - DNA, 15 bp, synthetic construct
  source 1..15: mol_type = other DNA
ggtgaccaccatgta

SEQ ID NO: 8877 - DNA, 15 bp, synthetic construct
  source 1..15: mol_type = other DNA
cagatcctgaggttc

SEQ ID NO: 8878 - DNA, 15 bp, synthetic construct
  source 1..15: mol_type = other DNA
gaacatcgctaccag

SEQ ID NO: 8879 - DNA, 15 bp, synthetic construct
  source 1..15: mol_type = other DNA
acaatggcgttccca

SEQ ID NO: 8880 - DNA, 15 bp, synthetic construct
  source 1..15: mol_type = other DNA
gtgctcacgatcagg

SEQ ID NO: 8881 - DNA, 15 bp, synthetic construct
  source 1..15: mol_type = other DNA
catccgccgaaagtc

SEQ ID NO: 8882 - DNA, 15 bp, synthetic construct
  source 1..15: mol_type = other DNA
gggttagggttgttc

SEQ ID NO: 8883 - DNA, 15 bp, synthetic construct
  source 1..15: mol_type = other DNA
gctcgcatgagcctg

SEQ ID NO: 8884 - DNA, 15 bp, synthetic construct
  source 1..15: mol_type = other DNA
ggacaccttccggta

SEQ ID NO: 8885 - DNA, 15 bp, synthetic construct
  source 1..15: mol_type = other DNA
tggtcttcagagcct

SEQ ID NO: 8886 - DNA, 15 bp, synthetic construct
  source 1..15: mol_type = other DNA
tccatgattgccttg

SEQ ID NO: 8887 - DNA, 15 bp, synthetic construct
  source 1..15: mol_type = other DNA
actggtattctctga

SEQ ID NO: 8888 - DNA, 15 bp, synthetic construct
  source 1..15: mol_type = other DNA
cattgcgttttcagt

SEQ ID NO: 8889 - DNA, 15 bp, synthetic construct
  source 1..15: mol_type = other DNA
ctcatgaaactgaag

SEQ ID NO: 8890 - DNA, 15 bp, synthetic construct
  source 1..15: mol_type = other DNA
aggcaatgtcactat

SEQ ID NO: 8891 - DNA, 15 bp, synthetic construct
  source 1..15: mol_type = other DNA
cctgagacatctcat

SEQ ID NO: 8892 - DNA, 15 bp, synthetic construct
  source 1..15: mol_type = other DNA
gaggcggcttggatg

SEQ ID NO: 8893 - DNA, 15 bp, synthetic construct
  source 1..15: mol_type = other DNA
ttttccgggaagatg

SEQ ID NO: 8894 - DNA, 15 bp, synthetic construct
  source 1..15: mol_type = other DNA
atacgtgttctcact

SEQ ID NO: 8895 - DNA, 15 bp, synthetic construct
  source 1..15: mol_type = other DNA
ctgtagtttcagggt

SEQ ID NO: 8896 - DNA, 15 bp, synthetic construct
  source 1..15: mol_type = other DNA
ctgaatccactctgg

SEQ ID NO: 8897 - DNA, 15 bp, synthetic construct
  source 1..15: mol_type = other DNA
atcctcatatcccaa

SEQ ID NO: 8898 - DNA, 15 bp, synthetic construct
  source 1..15: mol_type = other DNA
ccactcagtgactga

SEQ ID NO: 8899 - DNA, 15 bp, synthetic construct
  source 1..15: mol_type = other DNA
ctgctaaccacagtg

SEQ ID NO: 8900 - DNA, 15 bp, synthetic construct
  source 1..15: mol_type = other DNA
gcgattttctctgag

SEQ ID NO: 8901 - DNA, 15 bp, synthetic construct
  source 1..15: mol_type = other DNA
ggtatctgtgcatgg

SEQ ID NO: 8902 - DNA, 15 bp, synthetic construct
  source 1..15: mol_type = other DNA
cctgctcccgacact

SEQ ID NO: 8903 - DNA, 15 bp, synthetic construct
  source 1..15: mol_type = other DNA
acgtttgtcaatgta

SEQ ID NO: 8904 - DNA, 15 bp, synthetic construct
  source 1..15: mol_type = other DNA
atctcggcaggtatg

SEQ ID NO: 8905 - DNA, 15 bp, synthetic construct
  source 1..15: mol_type = other DNA
aacgtaatttcagcc

SEQ ID NO: 8906 - DNA, 15 bp, synthetic construct
  source 1..15: mol_type = other DNA
ccacccgtttggttg

SEQ ID NO: 8907 - DNA, 15 bp, synthetic construct
  source 1..15: mol_type = other DNA
cttctgaatgtgcgc

SEQ ID NO: 8908 - DNA, 15 bp, synthetic construct
  source 1..15: mol_type = other DNA
ctgaccttgaacttc

SEQ ID NO: 8909 - DNA, 15 bp, synthetic construct
  source 1..15: mol_type = other DNA
tctcatccacataga

SEQ ID NO: 8910 - DNA, 15 bp, synthetic construct
  source 1..15: mol_type = other DNA
cgcccgcgaaatgga

SEQ ID NO: 8911 - DNA, 15 bp, synthetic construct
  source 1..15: mol_type = other DNA
gatgttgttttcagc

SEQ ID NO: 8912 - DNA, 15 bp, synthetic construct
  source 1..15: mol_type = other DNA
gccacctagcttctt

SEQ ID NO: 8913 - DNA, 15 bp, synthetic construct
  source 1..15: mol_type = other DNA
ccatcctactggtca

SEQ ID NO: 8914 - DNA, 15 bp, synthetic construct
  source 1..15: mol_type = other DNA
gcttctccttctcaa

SEQ ID NO: 8915 - DNA, 15 bp, synthetic construct
  source 1..15: mol_type = other DNA
ggtcgcaggtaaagc

SEQ ID NO: 8916 - DNA, 15 bp, synthetic construct
  source 1..15: mol_type = other DNA
agggtgcgtgttcac

SEQ ID NO: 8917 - DNA, 15 bp, synthetic construct
  source 1..15: mol_type = other DNA
ccggaaggtcacgtt

SEQ ID NO: 8918 - DNA, 15 bp, synthetic construct
  source 1..15: mol_type = other DNA
attcgttgctcctct

SEQ ID NO: 8919 - DNA, 15 bp, synthetic construct
  source 1..15: mol_type = other DNA
tcaagcatggagtag

SEQ ID NO: 8920 - DNA, 15 bp, synthetic construct
  source 1..15: mol_type = other DNA
agttcttcccaaagg

SEQ ID NO: 8921 - DNA, 15 bp, synthetic construct
  source 1..15: mol_type = other DNA
ctggtagcctgaatg

SEQ ID NO: 8922 - DNA, 15 bp, synthetic construct
  source 1..15: mol_type = other DNA
tgaaactggttggag

SEQ ID NO: 8923 - DNA, 15 bp, synthetic construct
  source 1..15: mol_type = other DNA
ctttctccttgttgg

SEQ ID NO: 8924 - DNA, 15 bp, synthetic construct
  source 1..15: mol_type = other DNA
gggtgtcgcagcgaa

SEQ ID NO: 8925 - DNA, 15 bp, synthetic construct
  source 1..15: mol_type = other DNA
ggccacgaccactac

SEQ ID NO: 8926 - DNA, 15 bp, synthetic construct
  source 1..15: mol_type = other DNA
ggagaatgccgatca

SEQ ID NO: 8927 - DNA, 15 bp, synthetic construct
  source 1..15: mol_type = other DNA
ggatcagagatattc

SEQ ID NO: 8928 - DNA, 15 bp, synthetic construct
  source 1..15: mol_type = other DNA
cttcggaagaacgga

SEQ ID NO: 8929 - DNA, 15 bp, synthetic construct
  source 1..15: mol_type = other DNA
atcagacatctgaca

SEQ ID NO: 8930 - DNA, 15 bp, synthetic construct
  source 1..15: mol_type = other DNA
ggtaagtgaaggagg

SEQ ID NO: 8931 - DNA, 15 bp, synthetic construct
  source 1..15: mol_type = other DNA
gaacagccttaataa

SEQ ID NO: 8932 - DNA, 15 bp, synthetic construct
  source 1..15: mol_type = other DNA
cgggcacacttacat

SEQ ID NO: 8933 - DNA, 15 bp, synthetic construct
  source 1..15: mol_type = other DNA
ggtaaccaaggtact

SEQ ID NO: 8934 - DNA, 15 bp, synthetic construct
  source 1..15: mol_type = other DNA
ttgagtggtgccgta

SEQ ID NO: 8935 - DNA, 15 bp, synthetic construct
  source 1..15: mol_type = other DNA
tgccagcatagctga

SEQ ID NO: 8936 - DNA, 15 bp, synthetic construct
  source 1..15: mol_type = other DNA
ttttaaccacgttct

SEQ ID NO: 8937 - DNA, 15 bp, synthetic construct
  source 1..15: mol_type = other DNA
ggtgatgctgtccaa

SEQ ID NO: 8938 - DNA, 15 bp, synthetic construct
  source 1..15: mol_type = other DNA
ctggatccatgacga

SEQ ID NO: 8939 - DNA, 15 bp, synthetic construct
  source 1..15: mol_type = other DNA
acggactttctgcgg

SEQ ID NO: 8940 - DNA, 15 bp, synthetic construct
  source 1..15: mol_type = other DNA
ggaccctgacaaatg

SEQ ID NO: 8941 - DNA, 15 bp, synthetic construct
  source 1..15: mol_type = other DNA
acccgagacatggaa

SEQ ID NO: 8942 - DNA, 15 bp, synthetic construct
  source 1..15: mol_type = other DNA
tcttcacaagggtat

SEQ ID NO: 8943 - DNA, 15 bp, synthetic construct
  source 1..15: mol_type = other DNA
gagccgggcgaaatg

SEQ ID NO: 8944 - DNA, 15 bp, synthetic construct
  source 1..15: mol_type = other DNA
aagaacatggcaatc

SEQ ID NO: 8945 - DNA, 15 bp, synthetic construct
  source 1..15: mol_type = other DNA
tgtcctgcaagttgc

SEQ ID NO: 8946 - DNA, 15 bp, synthetic construct
  source 1..15: mol_type = other DNA
ctgggcagatcaaga

SEQ ID NO: 8947 - DNA, 15 bp, synthetic construct
  source 1..15: mol_type = other DNA
actcacttccataat

SEQ ID NO: 8948 - DNA, 15 bp, synthetic construct
  source 1..15: mol_type = other DNA
tgagatggtgaccaa

SEQ ID NO: 8949 - DNA, 15 bp, synthetic construct
  source 1..15: mol_type = other DNA
gtgaggttccggttc

SEQ ID NO: 8950 - DNA, 15 bp, synthetic construct
  source 1..15: mol_type = other DNA
tgcctgaccacgcaa

SEQ ID NO: 8951 - DNA, 15 bp, synthetic construct
  source 1..15: mol_type = other DNA
gttcaattccatgag

SEQ ID NO: 8952 - DNA, 15 bp, synthetic construct
  source 1..15: mol_type = other DNA
cagatgccgtgcatg

SEQ ID NO: 8953 - DNA, 15 bp, synthetic construct
  source 1..15: mol_type = other DNA
ttgtacaaagctgac

SEQ ID NO: 8954 - DNA, 15 bp, synthetic construct
  source 1..15: mol_type = other DNA
gtaagtggacaggtt

SEQ ID NO: 8955 - DNA, 15 bp, synthetic construct
  source 1..15: mol_type = other DNA
agctgtaacagatga

SEQ ID NO: 8956 - DNA, 15 bp, synthetic construct
  source 1..15: mol_type = other DNA
gtttcccggtagaag

SEQ ID NO: 8957 - DNA, 15 bp, synthetic construct
  source 1..15: mol_type = other DNA
agcaacaatattctg

SEQ ID NO: 8958 - DNA, 15 bp, synthetic construct
  source 1..15: mol_type = other DNA
agccataagcagttg

SEQ ID NO: 8959 - DNA, 15 bp, synthetic construct
  source 1..15: mol_type = other DNA
tttatctcctcaaca

SEQ ID NO: 8960 - DNA, 15 bp, synthetic construct
  source 1..15: mol_type = other DNA
tccacgttgagtaca

SEQ ID NO: 8961 - DNA, 15 bp, synthetic construct
  source 1..15: mol_type = other DNA
tggacaaaaatacca

SEQ ID NO: 8962 - DNA, 15 bp, synthetic construct
  source 1..15: mol_type = other DNA
cttccctaagaagat

SEQ ID NO: 8963 - DNA, 15 bp, synthetic construct
  source 1..15: mol_type = other DNA
tgtaagtgcctcctt

SEQ ID NO: 8964 - DNA, 15 bp, synthetic construct
  source 1..15: mol_type = other DNA
tgttggtctttttag

SEQ ID NO: 8965 - DNA, 15 bp, synthetic construct
  source 1..15: mol_type = other DNA
agcattgacgtcaga

SEQ ID NO: 8966 - DNA, 15 bp, synthetic construct
  source 1..15: mol_type = other DNA
aaggttctgttcata

SEQ ID NO: 8967 - DNA, 15 bp, synthetic construct
  source 1..15: mol_type = other DNA
gcttgagcatcttta

SEQ ID NO: 8968 - DNA, 15 bp, synthetic construct
  source 1..15: mol_type = other DNA
gccagctacgattac

SEQ ID NO: 8969 - DNA, 15 bp, synthetic construct
  source 1..15: mol_type = other DNA
gcctgtttctgggaa

SEQ ID NO: 8970 - DNA, 15 bp, synthetic construct
  source 1..15: mol_type = other DNA
gagcctgtcgtaagt

SEQ ID NO: 8971 - DNA, 15 bp, synthetic construct
  source 1..15: mol_type = other DNA
gtcttctaagtctag

SEQ ID NO: 8972 - DNA, 15 bp, synthetic construct
  source 1..15: mol_type = other DNA
atattgcttgttggt

SEQ ID NO: 8973 - DNA, 15 bp, synthetic construct
  source 1..15: mol_type = other DNA
ctggcgataagagct

SEQ ID NO: 8974 - DNA, 15 bp, synthetic construct
  source 1..15: mol_type = other DNA
agagccgtttatcca

SEQ ID NO: 8975 - DNA, 15 bp, synthetic construct
  source 1..15: mol_type = other DNA
gtctgtgagatggaa

SEQ ID NO: 8976 - DNA, 15 bp, synthetic construct
  source 1..15: mol_type = other DNA
ccagcacagctaagt

SEQ ID NO: 8977 - DNA, 15 bp, synthetic construct
  source 1..15: mol_type = other DNA
aatctggcatattcg

SEQ ID NO: 8978 - DNA, 15 bp, synthetic construct
  source 1..15: mol_type = other DNA
ctgttattccaaggg

SEQ ID NO: 8979 - DNA, 15 bp, synthetic construct
  source 1..15: mol_type = other DNA
ctcgcaagagagtga

SEQ ID NO: 8980 - DNA, 15 bp, synthetic construct
  source 1..15: mol_type = other DNA
gagatgggattcata

SEQ ID NO: 8981 - DNA, 15 bp, synthetic construct
  source 1..15: mol_type = other DNA
cccagtaacaaccaa

SEQ ID NO: 8982 - DNA, 15 bp, synthetic construct
  source 1..15: mol_type = other DNA
tgtgcagctacaagt

SEQ ID NO: 8983 - DNA, 15 bp, synthetic construct
  source 1..15: mol_type = other DNA
gctttgtcacgtatc

SEQ ID NO: 8984 - DNA, 15 bp, synthetic construct
  source 1..15: mol_type = other DNA
ctcgaataagcagca

SEQ ID NO: 8985 - DNA, 15 bp, synthetic construct
  source 1..15: mol_type = other DNA
tatgactcggatagc

SEQ ID NO: 8986 - DNA, 15 bp, synthetic construct
  source 1..15: mol_type = other DNA
tctcggagttgctgc

SEQ ID NO: 8987 - DNA, 15 bp, synthetic construct
  source 1..15: mol_type = other DNA
gaggagtcactagga

SEQ ID NO: 8988 - DNA, 15 bp, synthetic construct
  source 1..15: mol_type = other DNA
ttcccaacgtagaca

SEQ ID NO: 8989 - DNA, 15 bp, synthetic construct
  source 1..15: mol_type = other DNA
ccatgagaaattatg

SEQ ID NO: 8990 - DNA, 15 bp, synthetic construct
  source 1..15: mol_type = other DNA
tgttgaagctgagct

SEQ ID NO: 8991 - DNA, 15 bp, synthetic construct
  source 1..15: mol_type = other DNA
agaagtgacctggaa

SEQ ID NO: 8992 - DNA, 15 bp, synthetic construct
  source 1..15: mol_type = other DNA
gagtccaatccagta

SEQ ID NO: 8993 - DNA, 15 bp, synthetic construct
  source 1..15: mol_type = other DNA
acccaacccattttt

SEQ ID NO: 8994 - DNA, 15 bp, synthetic construct
  source 1..15: mol_type = other DNA
caccttacaggctct

SEQ ID NO: 8995 - DNA, 15 bp, synthetic construct
  source 1..15: mol_type = other DNA
ccacatacaaaatcc

SEQ ID NO: 8996 - DNA, 15 bp, synthetic construct
  source 1..15: mol_type = other DNA
gtcctggagtaaatg

SEQ ID NO: 8997 - DNA, 15 bp, synthetic construct
  source 1..15: mol_type = other DNA
ctgagaagcacagag

SEQ ID NO: 8998 - DNA, 15 bp, synthetic construct
  source 1..15: mol_type = other DNA
tcaagagcaactgtg

SEQ ID NO: 8999 - DNA, 15 bp, synthetic construct
  source 1..15: mol_type = other DNA
atgccataagcaagt

SEQ ID NO: 9000 - DNA, 15 bp, synthetic construct
  source 1..15: mol_type = other DNA
ttctgttcactggaa

SEQ ID NO: 9001 - DNA, 15 bp, synthetic construct
  source 1..15: mol_type = other DNA
gttcatctgtgtttt

SEQ ID NO: 9002 - DNA, 15 bp, synthetic construct
  source 1..15: mol_type = other DNA
ggctttgtccagtac

SEQ ID NO: 9003 - DNA, 15 bp, synthetic construct
  source 1..15: mol_type = other DNA
taatcctcacgtatc

SEQ ID NO: 9004 - DNA, 15 bp, synthetic construct
  source 1..15: mol_type = other DNA
aaatccaatccagcc

SEQ ID NO: 9005 - DNA, 15 bp, synthetic construct
  source 1..15: mol_type = other DNA
agagccattctccca

SEQ ID NO: 9006 - DNA, 15 bp, synthetic construct
  source 1..15: mol_type = other DNA
cctggattccactga

SEQ ID NO: 9007 - DNA, 15 bp, synthetic construct
  source 1..15: mol_type = other DNA
agcttctgagagtga

SEQ ID NO: 9008 - DNA, 15 bp, synthetic construct
  source 1..15: mol_type = other DNA
gtcccagaaattaac

SEQ ID NO: 9009 - DNA, 15 bp, synthetic construct
  source 1..15: mol_type = other DNA
ataagaagcagtaga

SEQ ID NO: 9010 - DNA, 15 bp, synthetic construct
  source 1..15: mol_type = other DNA
tggtcacagtgatca

SEQ ID NO: 9011 - DNA, 15 bp, synthetic construct
  source 1..15: mol_type = other DNA
aggtgtctggtaata

SEQ ID NO: 9012 - DNA, 15 bp, synthetic construct
  source 1..15: mol_type = other DNA
gatgtttgggcagaa

SEQ ID NO: 9013 - DNA, 15 bp, synthetic construct
  source 1..15: mol_type = other DNA
cccagtaagatttta

SEQ ID NO: 9014 - DNA, 15 bp, synthetic construct
  source 1..15: mol_type = other DNA
agctgttttctttag

SEQ ID NO: 9015 - DNA, 15 bp, synthetic construct
  source 1..15: mol_type = other DNA
ctgcagatctcgaag

SEQ ID NO: 9016 - DNA, 15 bp, synthetic construct
  source 1..15: mol_type = other DNA
caaagtgagaatacc

SEQ ID NO: 9017 - DNA, 15 bp, synthetic construct
  source 1..15: mol_type = other DNA
tagtttgttaacagg

SEQ ID NO: 9018 - DNA, 15 bp, synthetic construct
  source 1..15: mol_type = other DNA
ttggagaaccatcca

SEQ ID NO: 9019 - DNA, 15 bp, synthetic construct
  source 1..15: mol_type = other DNA
cctttttggcatttt

SEQ ID NO: 9020 - DNA, 15 bp, synthetic construct
  source 1..15: mol_type = other DNA
caaggaggtaaagtt

SEQ ID NO: 9021 - DNA, 15 bp, synthetic construct
  source 1..15: mol_type = other DNA
tgtcctcatactgag

SEQ ID NO: 9022 - DNA, 15 bp, synthetic construct
  source 1..15: mol_type = other DNA
ccaaacaatacacat

SEQ ID NO: 9023 - DNA, 15 bp, synthetic construct
  source 1..15: mol_type = other DNA
ccatttgaaaacact

SEQ ID NO: 9024 - DNA, 15 bp, synthetic construct
  source 1..15: mol_type = other DNA
cattagagaaccaat

SEQ ID NO: 9025 - DNA, 15 bp, synthetic construct
  source 1..15: mol_type = other DNA
ttgtagctgagtgaa

SEQ ID NO: 9026 - DNA, 15 bp, synthetic construct
  source 1..15: mol_type = other DNA
aatgaaacggattcc

SEQ ID NO: 9027 - DNA, 15 bp, synthetic construct
  source 1..15: mol_type = other DNA
gtgcacgtctaccgc

SEQ ID NO: 9028 - DNA, 15 bp, synthetic construct
  source 1..15: mol_type = other DNA
agctgtgtcgagacc

SEQ ID NO: 9029 - DNA, 15 bp, synthetic construct
  source 1..15: mol_type = other DNA
atttgttggaatgtg

SEQ ID NO: 9030 - DNA, 15 bp, synthetic construct
  source 1..15: mol_type = other DNA
ctgtggagtctaaga

SEQ ID NO: 9031 - DNA, 15 bp, synthetic construct
  source 1..15: mol_type = other DNA
cagagagggaagatc

SEQ ID NO: 9032 - DNA, 15 bp, synthetic construct
  source 1..15: mol_type = other DNA
ttgactactggacat

SEQ ID NO: 9033 - DNA, 15 bp, synthetic construct
  source 1..15: mol_type = other DNA
aggaagagaaacagt

SEQ ID NO: 9034 - DNA, 15 bp, synthetic construct
  source 1..15: mol_type = other DNA
gaggacccattaaaa

SEQ ID NO: 9035 - DNA, 15 bp, synthetic construct
  source 1..15: mol_type = other DNA
acatacaagaagcct

SEQ ID NO: 9036 - DNA, 15 bp, synthetic construct
  source 1..15: mol_type = other DNA
gagtgcacagtctcc

SEQ ID NO: 9037 - DNA, 15 bp, synthetic construct
  source 1..15: mol_type = other DNA
aacgtcctaagatct

SEQ ID NO: 9038 - DNA, 15 bp, synthetic construct
  source 1..15: mol_type = other DNA
ctgtatactttcaga

SEQ ID NO: 9039 - DNA, 15 bp, synthetic construct
  source 1..15: mol_type = other DNA
agtctcagttggcag

SEQ ID NO: 9040 - DNA, 15 bp, synthetic construct
  source 1..15: mol_type = other DNA
cagtttttaggacat

SEQ ID NO: 9041 - DNA, 15 bp, synthetic construct
  source 1..15: mol_type = other DNA
gtcctttgcatgcag

SEQ ID NO: 9042 - DNA, 15 bp, synthetic construct
  source 1..15: mol_type = other DNA
gattctgaattagct

SEQ ID NO: 9043 - DNA, 15 bp, synthetic construct
  source 1..15: mol_type = other DNA
acacagtccatgctg

SEQ ID NO: 9044 - DNA, 15 bp, synthetic construct
  source 1..15: mol_type = other DNA
agtgactctgacaca

SEQ ID NO: 9045 - DNA, 15 bp, synthetic construct
  source 1..15: mol_type = other DNA
aggacatgatgccta

SEQ ID NO: 9046 - DNA, 15 bp, synthetic construct
  source 1..15: mol_type = other DNA
tactcctcttgacct

SEQ ID NO: 9047 - DNA, 15 bp, synthetic construct
  source 1..15: mol_type = other DNA
ccagtgatactttca

SEQ ID NO: 9048 - DNA, 15 bp, synthetic construct
  source 1..15: mol_type = other DNA
ttgtatcttgttgag

SEQ ID NO: 9049 - DNA, 15 bp, synthetic construct
  source 1..15: mol_type = other DNA
tactaggctttaaac

SEQ ID NO: 9050 - DNA, 15 bp, synthetic construct
  source 1..15: mol_type = other DNA
ctaaccaatgcatga

SEQ ID NO: 9051 - DNA, 15 bp, synthetic construct
  source 1..15: mol_type = other DNA
accaggtttgaaaaa

SEQ ID NO: 9052 - DNA, 15 bp, synthetic construct
  source 1..15: mol_type = other DNA
gccctgaggaaataa

SEQ ID NO: 9053 - DNA, 15 bp, synthetic construct
  source 1..15: mol_type = other DNA
acaatatagtctcca

SEQ ID NO: 9054 - DNA, 15 bp, synthetic construct
  source 1..15: mol_type = other DNA
ttaaattctccttcc

SEQ ID NO: 9055 - DNA, 15 bp, synthetic construct
  source 1..15: mol_type = other DNA
accaaaggccttagt

SEQ ID NO: 9056 - DNA, 15 bp, synthetic construct
  source 1..15: mol_type = other DNA
gttctgcaaaacagg

SEQ ID NO: 9057 - DNA, 15 bp, synthetic construct
  source 1..15: mol_type = other DNA
accactacacaccct

SEQ ID NO: 9058 - DNA, 15 bp, synthetic construct
  source 1..15: mol_type = other DNA
gcatcaagtcatggg

SEQ ID NO: 9059 - DNA, 15 bp, synthetic construct
  source 1..15: mol_type = other DNA
catttcatactgggt

SEQ ID NO: 9060 - DNA, 15 bp, synthetic construct
  source 1..15: mol_type = other DNA
tggaagaagagtcct

SEQ ID NO: 9061 - DNA, 15 bp, synthetic construct
  source 1..15: mol_type = other DNA
ctagcactacctaag

SEQ ID NO: 9062 - DNA, 15 bp, synthetic construct
  source 1..15: mol_type = other DNA
ggaatgtattactgt

SEQ ID NO: 9063 - DNA, 15 bp, synthetic construct
  source 1..15: mol_type = other DNA
tgttcaaagcatcag

SEQ ID NO: 9064 - DNA, 15 bp, synthetic construct
  source 1..15: mol_type = other DNA
ttactgagcccttac

SEQ ID NO: 9065 - DNA, 15 bp, synthetic construct
  source 1..15: mol_type = other DNA
cgccaacgtgtgtcc

SEQ ID NO: 9066 - DNA, 15 bp, synthetic construct
  source 1..15: mol_type = other DNA
acatccatgaccttg

SEQ ID NO: 9067 - DNA, 15 bp, synthetic construct
  source 1..15: mol_type = other DNA
agataatgaagctgt

SEQ ID NO: 9068 - DNA, 15 bp, synthetic construct
  source 1..15: mol_type = other DNA
ttcatctgccaaggt

SEQ ID NO: 9069 - DNA, 15 bp, synthetic construct
  source 1..15: mol_type = other DNA
acctgtatccacctt

SEQ ID NO: 9070 - DNA, 15 bp, synthetic construct
  source 1..15: mol_type = other DNA
tggatggttttatgg

SEQ ID NO: 9071 - DNA, 15 bp, synthetic construct
  source 1..15: mol_type = other DNA
gcctttcatcccagc

SEQ ID NO: 9072 - DNA, 15 bp, synthetic construct
  source 1..15: mol_type = other DNA
tctttataccaagtg

SEQ ID NO: 9073 - DNA, 15 bp, synthetic construct
  source 1..15: mol_type = other DNA
tctgagcattggtca

SEQ ID NO: 9074 - DNA, 15 bp, synthetic construct
  source 1..15: mol_type = other DNA
gggtatcttttagaa

SEQ ID NO: 9075 - DNA, 15 bp, synthetic construct
  source 1..15: mol_type = other DNA
aaggtggtgaatatc

SEQ ID NO: 9076 - DNA, 15 bp, synthetic construct
  source 1..15: mol_type = other DNA
ctcatagtgggagat

SEQ ID NO: 9077 - DNA, 15 bp, synthetic construct
  source 1..15: mol_type = other DNA
aggagtaccgagact

SEQ ID NO: 9078 - DNA, 15 bp, synthetic construct
  source 1..15: mol_type = other DNA
aagagcattatgaga

SEQ ID NO: 9079 - DNA, 15 bp, synthetic construct
  source 1..15: mol_type = other DNA
agaatgagctctttc

SEQ ID NO: 9080 - DNA, 15 bp, synthetic construct
  source 1..15: mol_type = other DNA
tctcctgggttatgg

SEQ ID NO: 9081 - DNA, 15 bp, synthetic construct
  source 1..15: mol_type = other DNA
cggaaactttcattg

SEQ ID NO: 9082 - DNA, 15 bp, synthetic construct
  source 1..15: mol_type = other DNA
ggtgggttttgatgc

SEQ ID NO: 9083 - DNA, 15 bp, synthetic construct
  source 1..15: mol_type = other DNA
ggcgggtattgggct

SEQ ID NO: 9084 - DNA, 15 bp, synthetic construct
  source 1..15: mol_type = other DNA
gcacactgttgttgt

SEQ ID NO: 9085 - DNA, 15 bp, synthetic construct
  source 1..15: mol_type = other DNA
agggacgatggaaaa

SEQ ID NO: 9086 - DNA, 15 bp, synthetic construct
  source 1..15: mol_type = other DNA
agattctgcatggtg

SEQ ID NO: 9087 - DNA, 15 bp, synthetic construct
  source 1..15: mol_type = other DNA
gacaatggtcaggtt

SEQ ID NO: 9088 - DNA, 15 bp, synthetic construct
  source 1..15: mol_type = other DNA
ggaatgtgcgcttca

SEQ ID NO: 9089 - DNA, 15 bp, synthetic construct
  source 1..15: mol_type = other DNA
tgtctcatatcctcc

SEQ ID NO: 9090 - DNA, 15 bp, synthetic construct
  source 1..15: mol_type = other DNA
cctcatactgggaat

SEQ ID NO: 9091 - DNA, 15 bp, synthetic construct
  source 1..15: mol_type = other DNA
ccggagttcatggtc

SEQ ID NO: 9092 - DNA, 15 bp, synthetic construct
  source 1..15: mol_type = other DNA
tcggcatccgcaatg

SEQ ID NO: 9093 - DNA, 15 bp, synthetic construct
  source 1..15: mol_type = other DNA
cataggatgcatggc

SEQ ID NO: 9094 - DNA, 15 bp, synthetic construct
  source 1..15: mol_type = other DNA
tgccatatccagagg

SEQ ID NO: 9095 - DNA, 15 bp, synthetic construct
  source 1..15: mol_type = other DNA
tctagaaacagcaga

SEQ ID NO: 9096 - DNA, 15 bp, synthetic construct
  source 1..15: mol_type = other DNA
agtggtacgcttgtt

SEQ ID NO: 9097 - DNA, 15 bp, synthetic construct
  source 1..15: mol_type = other DNA
tagtagcttccactg

SEQ ID NO: 9098 - DNA, 15 bp, synthetic construct
  source 1..15: mol_type = other DNA
gttctgcaattggct

SEQ ID NO: 9099 - DNA, 15 bp, synthetic construct
  source 1..15: mol_type = other DNA
gagagctgtcgagct

SEQ ID NO: 9100 - DNA, 15 bp, synthetic construct
  source 1..15: mol_type = other DNA
gcaagagaaccaggc

SEQ ID NO: 9101 - DNA, 15 bp, synthetic construct
  source 1..15: mol_type = other DNA
gcaactgcctagaag

SEQ ID NO: 9102 - DNA, 15 bp, synthetic construct
  source 1..15: mol_type = other DNA
acacattctggaggt

SEQ ID NO: 9103 - DNA, 15 bp, synthetic construct
  source 1..15: mol_type = other DNA
tgatttgaagcagaa

SEQ ID NO: 9104 - DNA, 15 bp, synthetic construct
  source 1..15: mol_type = other DNA
taatctcatccatca

SEQ ID NO: 9105 - DNA, 15 bp, synthetic construct
  source 1..15: mol_type = other DNA
aaatccactaccggc

SEQ ID NO: 9106 - DNA, 15 bp, synthetic construct
  source 1..15: mol_type = other DNA
aggcagtgacttgca

SEQ ID NO: 9107 - DNA, 15 bp, synthetic construct
  source 1..15: mol_type = other DNA
aggaacggtgatgcc

SEQ ID NO: 9108 - DNA, 15 bp, synthetic construct
  source 1..15: mol_type = other DNA
agatctcatgcttgg

SEQ ID NO: 9109 - DNA, 15 bp, synthetic construct
  source 1..15: mol_type = other DNA
ccaccactagtgctg

SEQ ID NO: 9110 - DNA, 15 bp, synthetic construct
  source 1..15: mol_type = other DNA
ccggaaggacacact

SEQ ID NO: 9111 - DNA, 15 bp, synthetic construct
  source 1..15: mol_type = other DNA
cacattgcttcctgt

SEQ ID NO: 9112 - DNA, 15 bp, synthetic construct
  source 1..15: mol_type = other DNA
tggtctgataccagg

SEQ ID NO: 9113 - DNA, 15 bp, synthetic construct
  source 1..15: mol_type = other DNA
tttgggaaaactttg

SEQ ID NO: 9114 - DNA, 15 bp, synthetic construct
  source 1..15: mol_type = other DNA
ggagctaggtactac

SEQ ID NO: 9115 - DNA, 15 bp, synthetic construct
  source 1..15: mol_type = other DNA
gaactcctgagtgta

SEQ ID NO: 9116 - DNA, 15 bp, synthetic construct
  source 1..15: mol_type = other DNA
ctggacctagactga

SEQ ID NO: 9117 - DNA, 15 bp, synthetic construct
  source 1..15: mol_type = other DNA
gagctcagtggaaca

SEQ ID NO: 9118 - DNA, 15 bp, synthetic construct
  source 1..15: mol_type = other DNA
gagaaagcagtgcag

SEQ ID NO: 9119 - DNA, 15 bp, synthetic construct
  source 1..15: mol_type = other DNA
catgtctgagtgctg

SEQ ID NO: 9120 - DNA, 15 bp, synthetic construct
  source 1..15: mol_type = other DNA
cactgcaagagaaga

SEQ ID NO: 9121 - DNA, 15 bp, synthetic construct
  source 1..15: mol_type = other DNA
ggcagactcagatac

SEQ ID NO: 9122 - DNA, 15 bp, synthetic construct
  source 1..15: mol_type = other DNA
atctctgaaatctca

SEQ ID NO: 9123 - DNA, 15 bp, synthetic construct
  source 1..15: mol_type = other DNA
aggcctcagaatgag

SEQ ID NO: 9124 - DNA, 15 bp, synthetic construct
  source 1..15: mol_type = other DNA
gctgtgcggtggtta

SEQ ID NO: 9125 - DNA, 15 bp, synthetic construct
  source 1..15: mol_type = other DNA
gcgaggtgaataccg

SEQ ID NO: 9126 - DNA, 15 bp, synthetic construct
  source 1..15: mol_type = other DNA
gtgggaatcttcttg

SEQ ID NO: 9127 - DNA, 15 bp, synthetic construct
  source 1..15: mol_type = other DNA
gggtcctgaggaagt

SEQ ID NO: 9128 - DNA, 15 bp, synthetic construct
  source 1..15: mol_type = other DNA
tctgacatcactttc

SEQ ID NO: 9129 - DNA, 15 bp, synthetic construct
  source 1..15: mol_type = other DNA
aggatttccctcctc

SEQ ID NO: 9130 - DNA, 15 bp, synthetic construct
  source 1..15: mol_type = other DNA
gccttgtctgaccct

SEQ ID NO: 9131 - DNA, 15 bp, synthetic construct
  source 1..15: mol_type = other DNA
atactgcccaacttg

SEQ ID NO: 9132 - DNA, 15 bp, synthetic construct
  source 1..15: mol_type = other DNA
cttccagaaaaatgc

SEQ ID NO: 9133 - DNA, 15 bp, synthetic construct
  source 1..15: mol_type = other DNA
agaagctgcttcttg

SEQ ID NO: 9134 - DNA, 15 bp, synthetic construct
  source 1..15: mol_type = other DNA
gacacacagacaagc

SEQ ID NO: 9135 - DNA, 15 bp, synthetic construct
  source 1..15: mol_type = other DNA
agagatttttggtct

SEQ ID NO: 9136 - DNA, 15 bp, synthetic construct
  source 1..15: mol_type = other DNA
acacttcattcagca

SEQ ID NO: 9137 - DNA, 15 bp, synthetic construct
  source 1..15: mol_type = other DNA
tcgttctccatctct

SEQ ID NO: 9138 - DNA, 15 bp, synthetic construct
  source 1..15: mol_type = other DNA
gatgaaactgaactc

SEQ ID NO: 9139 - DNA, 15 bp, synthetic construct
  source 1..15: mol_type = other DNA
attaggtgacagatc

SEQ ID NO: 9140 - DNA, 15 bp, synthetic construct
  source 1..15: mol_type = other DNA
gctggtagctcgata

SEQ ID NO: 9141 - DNA, 15 bp, synthetic construct
  source 1..15: mol_type = other DNA
gcatacctggatttc

SEQ ID NO: 9142 - DNA, 15 bp, synthetic construct
  source 1..15: mol_type = other DNA
tgtacagtttcttcc

SEQ ID NO: 9143 - DNA, 15 bp, synthetic construct
  source 1..15: mol_type = other DNA
ctctttccgtcattc

SEQ ID NO: 9144 - DNA, 15 bp, synthetic construct
  source 1..15: mol_type = other DNA
tgtgtcataccaggc

SEQ ID NO: 9145 - DNA, 15 bp, synthetic construct
  source 1..15: mol_type = other DNA
aggtaaggaaaggcc

SEQ ID NO: 9146 - DNA, 15 bp, synthetic construct
  source 1..15: mol_type = other DNA
gtgatataccggtgt

SEQ ID NO: 9147 - DNA, 15 bp, synthetic construct
  source 1..15: mol_type = other DNA
cctgtccaaatcaca

SEQ ID NO: 9148 - DNA, 15 bp, synthetic construct
  source 1..15: mol_type = other DNA
ggagtctgcacctat

SEQ ID NO: 9149 - DNA, 15 bp, synthetic construct
  source 1..15: mol_type = other DNA
ggtcaagactcccaa

SEQ ID NO: 9150 - DNA, 15 bp, synthetic construct
  source 1..15: mol_type = other DNA
gagcacacctctgta

SEQ ID NO: 9151 - DNA, 15 bp, synthetic construct
  source 1..15: mol_type = other DNA
tcctgttcccagtgc

SEQ ID NO: 9152 - DNA, 15 bp, synthetic construct
  source 1..15: mol_type = other DNA
tgacaaacttgaagg

SEQ ID NO: 9153 - DNA, 15 bp, synthetic construct
  source 1..15: mol_type = other DNA
ggaagaggaagcttt

SEQ ID NO: 9154 - DNA, 15 bp, synthetic construct
  source 1..15: mol_type = other DNA
ctgcggagggtgaat

SEQ ID NO: 9155 - DNA, 15 bp, synthetic construct
  source 1..15: mol_type = other DNA
agagcagacagagca

SEQ ID NO: 9156 - DNA, 15 bp, synthetic construct
  source 1..15: mol_type = other DNA
acctgtgatgattgc

SEQ ID NO: 9157 - DNA, 15 bp, synthetic construct
  source 1..15: mol_type = other DNA
aggttatacatgatg

SEQ ID NO: 9158 - DNA, 15 bp, synthetic construct
  source 1..15: mol_type = other DNA
ctgctgacagggagt

SEQ ID NO: 9159 - DNA, 15 bp, synthetic construct
  source 1..15: mol_type = other DNA
tcaccaaaaggagca

SEQ ID NO: 9160 - DNA, 15 bp, synthetic construct
  source 1..15: mol_type = other DNA
cctctagtcgaaggg

SEQ ID NO: 9161 - DNA, 15 bp, synthetic construct
  source 1..15: mol_type = other DNA
acaaagcgttcttgt

SEQ ID NO: 9162 - DNA, 15 bp, synthetic construct
  source 1..15: mol_type = other DNA
gctagacagctctgt

SEQ ID NO: 9163 - DNA, 15 bp, synthetic construct
  source 1..15: mol_type = other DNA
gagcagttcaaaatg

SEQ ID NO: 9164 - DNA, 15 bp, synthetic construct
  source 1..15: mol_type = other DNA
tgctccagcgtacac

SEQ ID NO: 9165 - DNA, 15 bp, synthetic construct
  source 1..15: mol_type = other DNA
gtcttctttctcgtg

SEQ ID NO: 9166 - DNA, 15 bp, synthetic construct
  source 1..15: mol_type = other DNA
tcccagtgatagaaa

SEQ ID NO: 9167 - DNA, 15 bp, synthetic construct
  source 1..15: mol_type = other DNA
tggactgtaatgtgt

SEQ ID NO: 9168 - DNA, 15 bp, synthetic construct
  source 1..15: mol_type = other DNA
aaggtcagtatgagg

SEQ ID NO: 9169 - DNA, 15 bp, synthetic construct
  source 1..15: mol_type = other DNA
ctctcagggcgactg

SEQ ID NO: 9170 - DNA, 15 bp, synthetic construct
  source 1..15: mol_type = other DNA
attcacagaactggc

SEQ ID NO: 9171 - DNA, 15 bp, synthetic construct
  source 1..15: mol_type = other DNA
gcctgcacacgcatg

SEQ ID NO: 9172 - DNA, 15 bp, synthetic construct
  source 1..15: mol_type = other DNA
ttattggccttagat

SEQ ID NO: 9173 - DNA, 15 bp, synthetic construct
  source 1..15: mol_type = other DNA
ccagtgagatacgcg

SEQ ID NO: 9174 - DNA, 15 bp, synthetic construct
  source 1..15: mol_type = other DNA
cctggtggaaatcgc

SEQ ID NO: 9175 - DNA, 15 bp, synthetic construct
  source 1..15: mol_type = other DNA
gtcactgggtcgcag

SEQ ID NO: 9176 - DNA, 15 bp, synthetic construct
  source 1..15: mol_type = other DNA
agaagtcggacacgg

SEQ ID NO: 9177 - DNA, 15 bp, synthetic construct
  source 1..15: mol_type = other DNA
ccaaacgccgcgttc

SEQ ID NO: 9178 - DNA, 15 bp, synthetic construct
  source 1..15: mol_type = other DNA
agattccagagaagc

SEQ ID NO: 9179 - DNA, 15 bp, synthetic construct
  source 1..15: mol_type = other DNA
ctgtagggagtgcac

SEQ ID NO: 9180 - DNA, 15 bp, synthetic construct
  source 1..15: mol_type = other DNA
ttgagccggtctaga

SEQ ID NO: 9181 - DNA, 15 bp, synthetic construct
  source 1..15: mol_type = other DNA
ggaagagctcccgat

SEQ ID NO: 9182 - DNA, 15 bp, synthetic construct
  source 1..15: mol_type = other DNA
cgctcccgtagaagc

SEQ ID NO: 9183 - DNA, 15 bp, synthetic construct
  source 1..15: mol_type = other DNA
agaaacctggcaaac

SEQ ID NO: 9184 - DNA, 15 bp, synthetic construct
  source 1..15: mol_type = other DNA
ggctgtatctgcgcc

SEQ ID NO: 9185 - DNA, 15 bp, synthetic construct
  source 1..15: mol_type = other DNA
aaagagaaaagaacg

SEQ ID NO: 9186 - DNA, 15 bp, synthetic construct
  source 1..15: mol_type = other DNA
gtgctgccatgatgc

SEQ ID NO: 9187 - DNA, 15 bp, synthetic construct
  source 1..15: mol_type = other DNA
tccaacacgtggcag

SEQ ID NO: 9188 - DNA, 15 bp, synthetic construct
  source 1..15: mol_type = other DNA
tgaacacgtgtgggt

SEQ ID NO: 9189 - DNA, 15 bp, synthetic construct
  source 1..15: mol_type = other DNA
aaatcctgaatagcc

SEQ ID NO: 9190 - DNA, 15 bp, synthetic construct
  source 1..15: mol_type = other DNA
ttgaaccttctgtcc

SEQ ID NO: 9191 - DNA, 15 bp, synthetic construct
  source 1..15: mol_type = other DNA
gagtgtccagatgtg

SEQ ID NO: 9192 - DNA, 15 bp, synthetic construct
  source 1..15: mol_type = other DNA
taggctgtcccagtt

SEQ ID NO: 9193 - DNA, 15 bp, synthetic construct
  source 1..15: mol_type = other DNA
caacattttcctttc

SEQ ID NO: 9194 - DNA, 15 bp, synthetic construct
  source 1..15: mol_type = other DNA
cttaatttagatggg

SEQ ID NO: 9195 - DNA, 15 bp, synthetic construct
  source 1..15: mol_type = other DNA
tttgtcaatagcttg

SEQ ID NO: 9196 - DNA, 15 bp, synthetic construct
  source 1..15: mol_type = other DNA
ctgcaataggtgtgc

SEQ ID NO: 9197 - DNA, 15 bp, synthetic construct
  source 1..15: mol_type = other DNA
tcccaaatgaaggcg

SEQ ID NO: 9198 - DNA, 15 bp, synthetic construct
  source 1..15: mol_type = other DNA
tagaaaaggactttc

SEQ ID NO: 9199 - DNA, 15 bp, synthetic construct
  source 1..15: mol_type = other DNA
agcatgttcttgtag

SEQ ID NO: 9200 - DNA, 15 bp, synthetic construct
  source 1..15: mol_type = other DNA
gggagtcggaaggaa

SEQ ID NO: 9201 - DNA, 15 bp, synthetic construct
  source 1..15: mol_type = other DNA
agtggtgatgaagga

SEQ ID NO: 9202 - DNA, 15 bp, synthetic construct
  source 1..15: mol_type = other DNA
gccagagacgcgaag

SEQ ID NO: 9203 - DNA, 15 bp, synthetic construct
  source 1..15: mol_type = other DNA
ttccaggttcttcaa

SEQ ID NO: 9204 - DNA, 15 bp, synthetic construct
  source 1..15: mol_type = other DNA
gatccatgcaaggct

SEQ ID NO: 9205 - DNA, 15 bp, synthetic construct
  source 1..15: mol_type = other DNA
ttaacaacaggcacc

SEQ ID NO: 9206 - DNA, 15 bp, synthetic construct
  source 1..15: mol_type = other DNA
tatcctccttaatag

SEQ ID NO: 9207 - DNA, 15 bp, synthetic construct
  source 1..15: mol_type = other DNA
tcagacaggccaagg

SEQ ID NO: 9208 - DNA, 15 bp, synthetic construct
  source 1..15: mol_type = other DNA
aaggtggatagttct

SEQ ID NO: 9209 - DNA, 15 bp, synthetic construct
  source 1..15: mol_type = other DNA
tgcaagtttttcccg

SEQ ID NO: 9210 - DNA, 15 bp, synthetic construct
  source 1..15: mol_type = other DNA
tgttacttccataag

SEQ ID NO: 9211 - DNA, 15 bp, synthetic construct
  source 1..15: mol_type = other DNA
ccacaacacattcat

SEQ ID NO: 9212 - DNA, 15 bp, synthetic construct
  source 1..15: mol_type = other DNA
tttgttgtcaggcag

SEQ ID NO: 9213 - DNA, 15 bp, synthetic construct
  source 1..15: mol_type = other DNA
aaggttggagagtgt

SEQ ID NO: 9214 - DNA, 15 bp, synthetic construct
  source 1..15: mol_type = other DNA
tcaggtaaatgttga

SEQ ID NO: 9215 - DNA, 15 bp, synthetic construct
  source 1..15: mol_type = other DNA
aaggtcatggcttgc

SEQ ID NO: 9216 - DNA, 15 bp, synthetic construct
  source 1..15: mol_type = other DNA
cctacaaatgctttc

SEQ ID NO: 9217 - DNA, 15 bp, synthetic construct
  source 1..15: mol_type = other DNA
aacactgcactgaat

SEQ ID NO: 9218 - DNA, 15 bp, synthetic construct
  source 1..15: mol_type = other DNA
aagcatttctttccc

SEQ ID NO: 9219 - DNA, 15 bp, synthetic construct
  source 1..15: mol_type = other DNA
ttattagggatggca

SEQ ID NO: 9220 - DNA, 15 bp, synthetic construct
  source 1..15: mol_type = other DNA
gaactaccaagctgg

SEQ ID NO: 9221 - DNA, 15 bp, synthetic construct
  source 1..15: mol_type = other DNA
gccagtgaatgctcc

SEQ ID NO: 9222 - DNA, 15 bp, synthetic construct
  source 1..15: mol_type = other DNA
agcttttggcagact

SEQ ID NO: 9223 - DNA, 15 bp, synthetic construct
  source 1..15: mol_type = other DNA
ggatttctgttaacg

SEQ ID NO: 9224 - DNA, 15 bp, synthetic construct
  source 1..15: mol_type = other DNA
tcaagcaggaaatct

SEQ ID NO: 9225 - DNA, 15 bp, synthetic construct
  source 1..15: mol_type = other DNA
tgcagagcttctgtg

SEQ ID NO: 9226 - DNA, 15 bp, synthetic construct
  source 1..15: mol_type = other DNA
aggtcgtccatactg

SEQ ID NO: 9227 - DNA, 15 bp, synthetic construct
  source 1..15: mol_type = other DNA
gaaatcttataggca

SEQ ID NO: 9228 - DNA, 15 bp, synthetic construct
  source 1..15: mol_type = other DNA
tagtgtgatcgatct

SEQ ID NO: 9229 - DNA, 15 bp, synthetic construct
  source 1..15: mol_type = other DNA
tggagattaggtaac

SEQ ID NO: 9230 - DNA, 15 bp, synthetic construct
  source 1..15: mol_type = other DNA
caggaaattcagtta

SEQ ID NO: 9231 - DNA, 15 bp, synthetic construct
  source 1..15: mol_type = other DNA
ggaaaagacgacagg

SEQ ID NO: 9232 - DNA, 15 bp, synthetic construct
  source 1..15: mol_type = other DNA
agcttgggtgttttg

SEQ ID NO: 9233 - DNA, 15 bp, synthetic construct
  source 1..15: mol_type = other DNA
ggctaagcaactgct

SEQ ID NO: 9234 - DNA, 15 bp, synthetic construct
  source 1..15: mol_type = other DNA
tagtctggtatgtgg

SEQ ID NO: 9235 - DNA, 15 bp, synthetic construct
  source 1..15: mol_type = other DNA
acatagctgatgtgg

SEQ ID NO: 9236 - DNA, 15 bp, synthetic construct
  source 1..15: mol_type = other DNA
tccaaagtggtgtca

SEQ ID NO: 9237 - DNA, 15 bp, synthetic construct
  source 1..15: mol_type = other DNA
atcgagtctgacact

SEQ ID NO: 9238 - DNA, 15 bp, synthetic construct
  source 1..15: mol_type = other DNA
tccgggaatgaggtg

SEQ ID NO: 9239 - DNA, 15 bp, synthetic construct
  source 1..15: mol_type = other DNA
gattgttgcagcggt

SEQ ID NO: 9240 - DNA, 15 bp, synthetic construct
  source 1..15: mol_type = other DNA
tggagccgcggtttg

SEQ ID NO: 9241 - DNA, 15 bp, synthetic construct
  source 1..15: mol_type = other DNA
tcacgcggatagctt

SEQ ID NO: 9242 - DNA, 15 bp, synthetic construct
  source 1..15: mol_type = other DNA
ccttagcacttccag

SEQ ID NO: 9243 - DNA, 15 bp, synthetic construct
  source 1..15: mol_type = other DNA
ggttgacgtctggac

SEQ ID NO: 9244 - DNA, 15 bp, synthetic construct
  source 1..15: mol_type = other DNA
ggcacatcaggaaca

SEQ ID NO: 9245 - DNA, 15 bp, synthetic construct
  source 1..15: mol_type = other DNA
ggtccttagggcaaa

SEQ ID NO: 9246 - DNA, 15 bp, synthetic construct
  source 1..15: mol_type = other DNA
gtcccaccagtttgg

SEQ ID NO: 9247 - DNA, 15 bp, synthetic construct
  source 1..15: mol_type = other DNA
cacgcgatggtttac

SEQ ID NO: 9248 - DNA, 15 bp, synthetic construct
  source 1..15: mol_type = other DNA
caaatgagacacttt

SEQ ID NO: 9249 - DNA, 15 bp, synthetic construct
  source 1..15: mol_type = other DNA
ggcggccacaagttt

SEQ ID NO: 9250 - DNA, 15 bp, synthetic construct
  source 1..15: mol_type = other DNA
tccaaggctgtatcc

SEQ ID NO: 9251 - DNA, 15 bp, synthetic construct
  source 1..15: mol_type = other DNA
atcccttgatcgact

SEQ ID NO: 9252 - DNA, 15 bp, synthetic construct
  source 1..15: mol_type = other DNA
atggcccaatacgcc

SEQ ID NO: 9253 - DNA, 15 bp, synthetic construct
  source 1..15: mol_type = other DNA
cctctggtgaatgtg

SEQ ID NO: 9254 - DNA, 15 bp, synthetic construct
  source 1..15: mol_type = other DNA
ctccatccagttgat

SEQ ID NO: 9255 - DNA, 15 bp, synthetic construct
  source 1..15: mol_type = other DNA
gacgcactggaagta

SEQ ID NO: 9256 - DNA, 15 bp, synthetic construct
  source 1..15: mol_type = other DNA
gagtcgatgaagaga

SEQ ID NO: 9257 - DNA, 15 bp, synthetic construct
  source 1..15: mol_type = other DNA
tgtgattgaaatgac

SEQ ID NO: 9258 - DNA, 15 bp, synthetic construct
  source 1..15: mol_type = other DNA
tgactttcttattgg

SEQ ID NO: 9259 - DNA, 15 bp, synthetic construct
  source 1..15: mol_type = other DNA
acctccattcgggta

SEQ ID NO: 9260 - DNA, 15 bp, synthetic construct
  source 1..15: mol_type = other DNA
ctgtaggccttactt

SEQ ID NO: 9261 - DNA, 15 bp, synthetic construct
  source 1..15: mol_type = other DNA
aaaaggatgaactac

SEQ ID NO: 9262 - DNA, 15 bp, synthetic construct
  source 1..15: mol_type = other DNA
gcaacggaaacccaa

SEQ ID NO: 9263 - DNA, 15 bp, synthetic construct
  source 1..15: mol_type = other DNA
ggtgaacgggatccc

SEQ ID NO: 9264 - DNA, 15 bp, synthetic construct
  source 1..15: mol_type = other DNA
agatggcaagtccaa

SEQ ID NO: 9265 - DNA, 15 bp, synthetic construct
  source 1..15: mol_type = other DNA
cagcgcctctgctag

SEQ ID NO: 9266 - DNA, 15 bp, synthetic construct
  source 1..15: mol_type = other DNA
agtgaactggtaacc

SEQ ID NO: 9267 - DNA, 15 bp, synthetic construct
  source 1..15: mol_type = other DNA
gggacaaaaacacgc

SEQ ID NO: 9268 - DNA, 15 bp, synthetic construct
  source 1..15: mol_type = other DNA
aggtacggctgtcat

SEQ ID NO: 9269 - DNA, 15 bp, synthetic construct
  source 1..15: mol_type = other DNA
gccatccatgaatgc

SEQ ID NO: 9270 - DNA, 15 bp, synthetic construct
  source 1..15: mol_type = other DNA
gctgcagtcaccgtt

SEQ ID NO: 9271 - DNA, 15 bp, synthetic construct
  source 1..15: mol_type = other DNA
aacagtctttggtcc

SEQ ID NO: 9272 - DNA, 15 bp, synthetic construct
  source 1..15: mol_type = other DNA
gaagcctggtagtac

SEQ ID NO: 9273 - DNA, 15 bp, synthetic construct
  source 1..15: mol_type = other DNA
aaactgactaggttg

SEQ ID NO: 9274 - DNA, 15 bp, synthetic construct
  source 1..15: mol_type = other DNA
tttattacaggcaag

SEQ ID NO: 9275 - DNA, 15 bp, synthetic construct
  source 1..15: mol_type = other DNA
gatttcatctgagga

SEQ ID NO: 9276 - DNA, 15 bp, synthetic construct
  source 1..15: mol_type = other DNA
aagcacgagggatac

SEQ ID NO: 9277 - DNA, 15 bp, synthetic construct
  source 1..15: mol_type = other DNA
accattggagcatgt

SEQ ID NO: 9278 - DNA, 15 bp, synthetic construct
  source 1..15: mol_type = other DNA
ccacacagtcgttgc

SEQ ID NO: 9279 - DNA, 15 bp, synthetic construct
  source 1..15: mol_type = other DNA
atcccgaccattgga

SEQ ID NO: 9280 - DNA, 15 bp, synthetic construct
  source 1..15: mol_type = other DNA
atcttgacgttcatc

SEQ ID NO: 9281 - DNA, 15 bp, synthetic construct
  source 1..15: mol_type = other DNA
tataagggtaacccg

SEQ ID NO: 9282 - DNA, 15 bp, synthetic construct
  source 1..15: mol_type = other DNA
ctttcctgactcgaa

SEQ ID NO: 9283 - DNA, 15 bp, synthetic construct
  source 1..15: mol_type = other DNA
atcattagctttgca

SEQ ID NO: 9284 - DNA, 15 bp, synthetic construct
  source 1..15: mol_type = other DNA
ttcctgggcaatcta

SEQ ID NO: 9285 - DNA, 15 bp, synthetic construct
  source 1..15: mol_type = other DNA
tttgatacagtggtt

SEQ ID NO: 9286 - DNA, 15 bp, synthetic construct
  source 1..15: mol_type = other DNA
ggaatgtagcctttt

SEQ ID NO: 9287 - DNA, 15 bp, synthetic construct
  source 1..15: mol_type = other DNA
cgtgttgacgcactc

SEQ ID NO: 9288 - DNA, 15 bp, synthetic construct
  source 1..15: mol_type = other DNA
tgcagtctccgttcg

SEQ ID NO: 9289 - DNA, 15 bp, synthetic construct
  source 1..15: mol_type = other DNA
tctgtatccatcggg

SEQ ID NO: 9290 - DNA, 15 bp, synthetic construct
  source 1..15: mol_type = other DNA
cttcattcacccagt

SEQ ID NO: 9291 - DNA, 15 bp, synthetic construct
  source 1..15: mol_type = other DNA
accatgatgtagccc

SEQ ID NO: 9292 - DNA, 15 bp, synthetic construct
  source 1..15: mol_type = other DNA
acgcggttgatgcag

SEQ ID NO: 9293 - DNA, 15 bp, synthetic construct
  source 1..15: mol_type = other DNA
gagcggcagtgtgaa

SEQ ID NO: 9294 - DNA, 15 bp, synthetic construct
  source 1..15: mol_type = other DNA
acagacagaagaaag

SEQ ID NO: 9295 - DNA, 15 bp, synthetic construct
  source 1..15: mol_type = other DNA
tcccggaacagactg

SEQ ID NO: 9296 - DNA, 15 bp, synthetic construct
  source 1..15: mol_type = other DNA
gtattcacacactcc

SEQ ID NO: 9297 - DNA, 15 bp, synthetic construct
  source 1..15: mol_type = other DNA
ataccgccagcataa

SEQ ID NO: 9298 - DNA, 15 bp, synthetic construct
  source 1..15: mol_type = other DNA
cagtctcttgtaccc

SEQ ID NO: 9299 - DNA, 15 bp, synthetic construct
  source 1..15: mol_type = other DNA
cgttcacagtgttca

SEQ ID NO: 9300 - DNA, 15 bp, synthetic construct
  source 1..15: mol_type = other DNA
ggccattctcacagc

SEQ ID NO: 9301 - DNA, 15 bp, synthetic construct
  source 1..15: mol_type = other DNA
aaattcctcatcggg

SEQ ID NO: 9302 - DNA, 15 bp, synthetic construct
  source 1..15: mol_type = other DNA
gtatctctgcaatcc

SEQ ID NO: 9303 - DNA, 15 bp, synthetic construct
  source 1..15: mol_type = other DNA
gggagtgaagacgat

SEQ ID NO: 9304 - DNA, 15 bp, synthetic construct
  source 1..15: mol_type = other DNA
agccagtctcacata

SEQ ID NO: 9305 - DNA, 15 bp, synthetic construct
  source 1..15: mol_type = other DNA
ggagccttctaggtt

SEQ ID NO: 9306 - DNA, 15 bp, synthetic construct
  source 1..15: mol_type = other DNA
gaagcatcgtagtgg

SEQ ID NO: 9307 - DNA, 15 bp, synthetic construct
  source 1..15: mol_type = other DNA
tgccacacatggtgt

SEQ ID NO: 9308 - DNA, 15 bp, synthetic construct
  source 1..15: mol_type = other DNA
acaggcggatgtcgg

SEQ ID NO: 9309 - DNA, 15 bp, synthetic construct
  source 1..15: mol_type = other DNA
ctttgtgatcttgtt

SEQ ID NO: 9310 - DNA, 15 bp, synthetic construct
  source 1..15: mol_type = other DNA
tcagccagttcgttg

SEQ ID NO: 9311 - DNA, 15 bp, synthetic construct
  source 1..15: mol_type = other DNA
agatccagctcaacc

SEQ ID NO: 9312 - DNA, 15 bp, synthetic construct
  source 1..15: mol_type = other DNA
tccaccatttcttga

SEQ ID NO: 9313 - DNA, 15 bp, synthetic construct
  source 1..15: mol_type = other DNA
atatatgctgtgaac

SEQ ID NO: 9314 - DNA, 15 bp, synthetic construct
  source 1..15: mol_type = other DNA
ctgcataacatttgg

SEQ ID NO: 9315 - DNA, 15 bp, synthetic construct
  source 1..15: mol_type = other DNA
agactctgtcaggtt

SEQ ID NO: 9316 - DNA, 15 bp, synthetic construct
  source 1..15: mol_type = other DNA
gtctaagtagagagt

SEQ ID NO: 9317 - DNA, 15 bp, synthetic construct
  source 1..15: mol_type = other DNA
cttgtgatgaaatag

SEQ ID NO: 9318 - DNA, 15 bp, synthetic construct
  source 1..15: mol_type = other DNA
gcgattgccatccaa

SEQ ID NO: 9319 - DNA, 15 bp, synthetic construct
  source 1..15: mol_type = other DNA
gcagtctggctatct

SEQ ID NO: 9320 - DNA, 15 bp, synthetic construct
  source 1..15: mol_type = other DNA
gccactggtaccacc

SEQ ID NO: 9321 - DNA, 15 bp, synthetic construct
  source 1..15: mol_type = other DNA
tatacactggtatgg

SEQ ID NO: 9322 - DNA, 15 bp, synthetic construct
  source 1..15: mol_type = other DNA
tcatcacagtacatg

SEQ ID NO: 9323 - DNA, 15 bp, synthetic construct
  source 1..15: mol_type = other DNA
agcaacacgtagaca

SEQ ID NO: 9324 - DNA, 15 bp, synthetic construct
  source 1..15: mol_type = other DNA
cgcacatatctgcca

SEQ ID NO: 9325 - DNA, 15 bp, synthetic construct
  source 1..15: mol_type = other DNA
ggtgcacagtttggt

SEQ ID NO: 9326 - DNA, 15 bp, synthetic construct
  source 1..15: mol_type = other DNA
ctcatcagggatgtt

SEQ ID NO: 9327 - DNA, 15 bp, synthetic construct
  source 1..15: mol_type = other DNA
gacctccaggtaata

SEQ ID NO: 9328 - DNA, 15 bp, synthetic construct
  source 1..15: mol_type = other DNA
ctgatgaaaggccgc

SEQ ID NO: 9329 - DNA, 15 bp, synthetic construct
  source 1..15: mol_type = other DNA
ccgattgtgctggag

SEQ ID NO: 9330 - DNA, 15 bp, synthetic construct
  source 1..15: mol_type = other DNA
gatacttgattccag

SEQ ID NO: 9331 - DNA, 15 bp, synthetic construct
  source 1..15: mol_type = other DNA
tccatgcaaccagta

SEQ ID NO: 9332 - DNA, 15 bp, synthetic construct
  source 1..15: mol_type = other DNA
gagtaggataatggc

SEQ ID NO: 9333 - DNA, 15 bp, synthetic construct
  source 1..15: mol_type = other DNA
ctcaataactagtcc

SEQ ID NO: 9334 - DNA, 15 bp, synthetic construct
  source 1..15: mol_type = other DNA
tggtggtgataattt

SEQ ID NO: 9335 - DNA, 15 bp, synthetic construct
  source 1..15: mol_type = other DNA
ctgattccagttagg

SEQ ID NO: 9336 - DNA, 15 bp, synthetic construct
  source 1..15: mol_type = other DNA
tggtgcactccatag

SEQ ID NO: 9337 - DNA, 15 bp, synthetic construct
  source 1..15: mol_type = other DNA
caaagaagaggagag

SEQ ID NO: 9338 - DNA, 15 bp, synthetic construct
  source 1..15: mol_type = other DNA
ttctgtgaaattcag

SEQ ID NO: 9339 - DNA, 15 bp, synthetic construct
  source 1..15: mol_type = other DNA
ataattctgcatgac

SEQ ID NO: 9340 - DNA, 15 bp, synthetic construct
  source 1..15: mol_type = other DNA
ttagagggaacccag

SEQ ID NO: 9341 - DNA, 15 bp, synthetic construct
  source 1..15: mol_type = other DNA
ctcagatggccactg

SEQ ID NO: 9342 - DNA, 15 bp, synthetic construct
  source 1..15: mol_type = other DNA
ctttcaaggctgttt

SEQ ID NO: 9343 - DNA, 15 bp, synthetic construct
  source 1..15: mol_type = other DNA
aagaagacaattagc

SEQ ID NO: 9344 - DNA, 15 bp, synthetic construct
  source 1..15: mol_type = other DNA
tcactggaaccttcc

SEQ ID NO: 9345 - DNA, 15 bp, synthetic construct
  source 1..15: mol_type = other DNA
gagttgtaacaatag

SEQ ID NO: 9346 - DNA, 15 bp, synthetic construct
  source 1..15: mol_type = other DNA
agatgaccacgaatc

SEQ ID NO: 9347 - DNA, 15 bp, synthetic construct
  source 1..15: mol_type = other DNA
cagggcggtcaaaag

SEQ ID NO: 9348 - DNA, 15 bp, synthetic construct
  source 1..15: mol_type = other DNA
ggactgtttaatgtg

SEQ ID NO: 9349 - DNA, 15 bp, synthetic construct
  source 1..15: mol_type = other DNA
cttttgacatagcaa

SEQ ID NO: 9350 - DNA, 15 bp, synthetic construct
  source 1..15: mol_type = other DNA
caaatggttcagttt

SEQ ID NO: 9351 - DNA, 15 bp, synthetic construct
  source 1..15: mol_type = other DNA
gctgattcttgtttg

SEQ ID NO: 9352 - DNA, 15 bp, synthetic construct
  source 1..15: mol_type = other DNA
acagagggaagatca

SEQ ID NO: 9353 - DNA, 15 bp, synthetic construct
  source 1..15: mol_type = other DNA
ggagtagtagtaggg

SEQ ID NO: 9354 - DNA, 15 bp, synthetic construct
  source 1..15: mol_type = other DNA
ccaccgagtaggtac

SEQ ID NO: 9355 - DNA, 15 bp, synthetic construct
  source 1..15: mol_type = other DNA
tgagtgtgcaacaga

SEQ ID NO: 9356 - DNA, 15 bp, synthetic construct
  source 1..15: mol_type = other DNA
tttttcccacacttg

SEQ ID NO: 9357 - DNA, 15 bp, synthetic construct
  source 1..15: mol_type = other DNA
tccctgcagttccta

SEQ ID NO: 9358 - DNA, 15 bp, synthetic construct
  source 1..15: mol_type = other DNA
gagacaaacagtggc

SEQ ID NO: 9359 - DNA, 15 bp, synthetic construct
  source 1..15: mol_type = other DNA
gcagcgtttccagag

SEQ ID NO: 9360 - DNA, 15 bp, synthetic construct
  source 1..15: mol_type = other DNA
cactcaaagcgccgc

SEQ ID NO: 9361 - DNA, 15 bp, synthetic construct
  source 1..15: mol_type = other DNA
agcttggtcttacgc

SEQ ID NO: 9362 - DNA, 15 bp, synthetic construct
  source 1..15: mol_type = other DNA
gttctcaacttgaag

SEQ ID NO: 9363 - DNA, 15 bp, synthetic construct
  source 1..15: mol_type = other DNA
acatgcatccatctc

SEQ ID NO: 9364 - DNA, 15 bp, synthetic construct
  source 1..15: mol_type = other DNA
aatgatgttctcatg

SEQ ID NO: 9365 - DNA, 15 bp, synthetic construct
  source 1..15: mol_type = other DNA
tcgatggttggtgct

SEQ ID NO: 9366 - DNA, 15 bp, synthetic construct
  source 1..15: mol_type = other DNA
caggaaccctgtgtg

SEQ ID NO: 9367 - DNA, 15 bp, synthetic construct
  source 1..15: mol_type = other DNA
ctctttagagagaac

SEQ ID NO: 9368 - DNA, 15 bp, synthetic construct
  source 1..15: mol_type = other DNA
ctggtcaagataatg

SEQ ID NO: 9369 - DNA, 15 bp, synthetic construct
  source 1..15: mol_type = other DNA
ttgtgtggaagagaa

SEQ ID NO: 9370 - DNA, 15 bp, synthetic construct
  source 1..15: mol_type = other DNA
acggtgcagaacgtt

SEQ ID NO: 9371 - DNA, 15 bp, synthetic construct
  source 1..15: mol_type = other DNA
aggtaccttggttag

SEQ ID NO: 9372 - DNA, 15 bp, synthetic construct
  source 1..15: mol_type = other DNA
cctcgccgatgtacg

SEQ ID NO: 9373 - DNA, 15 bp, synthetic construct
  source 1..15: mol_type = other DNA
gaaagcatttctgcc

SEQ ID NO: 9374 - DNA, 15 bp, synthetic construct
  source 1..15: mol_type = other DNA
agcttgtaaagatct

SEQ ID NO: 9375 - DNA, 15 bp, synthetic construct
  source 1..15: mol_type = other DNA
acagccctaacacaa

SEQ ID NO: 9376 - DNA, 15 bp, synthetic construct
  source 1..15: mol_type = other DNA
agccactcggaccga

SEQ ID NO: 9377 - DNA, 15 bp, synthetic construct
  source 1..15: mol_type = other DNA
gggtcgtaatactgc

SEQ ID NO: 9378 - DNA, 15 bp, synthetic construct
  source 1..15: mol_type = other DNA
gagtcagcatttggg

SEQ ID NO: 9379 - DNA, 15 bp, synthetic construct
  source 1..15: mol_type = other DNA
tttcagggcaagaat

SEQ ID NO: 9380 - DNA, 15 bp, synthetic construct
  source 1..15: mol_type = other DNA
cagatatggtcattg

SEQ ID NO: 9381 - DNA, 15 bp, synthetic construct
  source 1..15: mol_type = other DNA
gtctggtgctcaaag

SEQ ID NO: 9382 - DNA, 15 bp, synthetic construct
  source 1..15: mol_type = other DNA
gcttctcaaagctac

SEQ ID NO: 9383 - DNA, 15 bp, synthetic construct
  source 1..15: mol_type = other DNA
aagaacaccgatgtc

SEQ ID NO: 9384 - DNA, 15 bp, synthetic construct
  source 1..15: mol_type = other DNA
acataatttctggag

SEQ ID NO: 9385 - DNA, 15 bp, synthetic construct
  source 1..15: mol_type = other DNA
ttctacttcaatcct

SEQ ID NO: 9386 - DNA, 15 bp, synthetic construct
  source 1..15: mol_type = other DNA
cacggtgctgtgtta

SEQ ID NO: 9387 - DNA, 15 bp, synthetic construct
  source 1..15: mol_type = other DNA
gagatgctgacatgc

SEQ ID NO: 9388 - DNA, 15 bp, synthetic construct
  source 1..15: mol_type = other DNA
ggtgcctcgtgttta

SEQ ID NO: 9389 - DNA, 15 bp, synthetic construct
  source 1..15: mol_type = other DNA
gtgaaagatggcaca

SEQ ID NO: 9390 - DNA, 15 bp, synthetic construct
  source 1..15: mol_type = other DNA
tccttctacatgggt

SEQ ID NO: 9391 - DNA, 15 bp, synthetic construct
  source 1..15: mol_type = other DNA
caataaggaggacgc

SEQ ID NO: 9392 - DNA, 15 bp, synthetic construct
  source 1..15: mol_type = other DNA
gtttgctcaatatag

SEQ ID NO: 9393 - DNA, 15 bp, synthetic construct
  source 1..15: mol_type = other DNA
caagggagttccgat

SEQ ID NO: 9394 - DNA, 15 bp, synthetic construct
  source 1..15: mol_type = other DNA
ttacactcaggaccc

SEQ ID NO: 9395 - DNA, 15 bp, synthetic construct
  source 1..15: mol_type = other DNA
accctgatttatgaa

SEQ ID NO: 9396 - DNA, 15 bp, synthetic construct
  source 1..15: mol_type = other DNA
actttcggtcagaga

SEQ ID NO: 9397 - DNA, 15 bp, synthetic construct
  source 1..15: mol_type = other DNA
gccggagattgacac

SEQ ID NO: 9398 - DNA, 15 bp, synthetic construct
  source 1..15: mol_type = other DNA
cagggaactgagaaa

SEQ ID NO: 9399 - DNA, 15 bp, synthetic construct
  source 1..15: mol_type = other DNA
ctgtcattgttcggt

SEQ ID NO: 9400 - DNA, 15 bp, synthetic construct
  source 1..15: mol_type = other DNA
ccaatcactgaggag

SEQ ID NO: 9401 - DNA, 15 bp, synthetic construct
  source 1..15: mol_type = other DNA
tgccaaaagaggctc

SEQ ID NO: 9402 - DNA, 15 bp, synthetic construct
  source 1..15: mol_type = other DNA
gtgcgggagcaactg

SEQ ID NO: 9403 - DNA, 15 bp, synthetic construct
  source 1..15: mol_type = other DNA
gcctctttggagaag

SEQ ID NO: 9404 - DNA, 15 bp, synthetic construct
  source 1..15: mol_type = other DNA
acgtttctcataggt

SEQ ID NO: 9405 - DNA, 15 bp, synthetic construct
  source 1..15: mol_type = other DNA
aggttggcaagagaa

SEQ ID NO: 9406 - DNA, 15 bp, synthetic construct
  source 1..15: mol_type = other DNA
gtttgagttcaaggg

SEQ ID NO: 9407 - DNA, 15 bp, synthetic construct
  source 1..15: mol_type = other DNA
cagaagagaggagtc

SEQ ID NO: 9408 - DNA, 15 bp, synthetic construct
  source 1..15: mol_type = other DNA
tacttttacaacgga

SEQ ID NO: 9409 - DNA, 15 bp, synthetic construct
  source 1..15: mol_type = other DNA
actgtcctagcaacc

SEQ ID NO: 9410 - DNA, 15 bp, synthetic construct
  source 1..15: mol_type = other DNA
attggttgggtgtct

SEQ ID NO: 9411 - DNA, 15 bp, synthetic construct
  source 1..15: mol_type = other DNA
gaagatgcttgtctc

SEQ ID NO: 9412 - DNA, 15 bp, synthetic construct
  source 1..15: mol_type = other DNA
atcgtgctctcactt

SEQ ID NO: 9413 - DNA, 15 bp, synthetic construct
  source 1..15: mol_type = other DNA
tgagacaacaccagc

SEQ ID NO: 9414 - DNA, 15 bp, synthetic construct
  source 1..15: mol_type = other DNA
tttcattgcccattg

SEQ ID NO: 9415 - DNA, 15 bp, synthetic construct
  source 1..15: mol_type = other DNA
agccataggaccgta

SEQ ID NO: 9416 - DNA, 15 bp, synthetic construct
  source 1..15: mol_type = other DNA
aaccatttctgtagt

SEQ ID NO: 9417 - DNA, 15 bp, synthetic construct
  source 1..15: mol_type = other DNA
agtgtgtagtcctgt

SEQ ID NO: 9418 - DNA, 15 bp, synthetic construct
  source 1..15: mol_type = other DNA
tttaacacttcacct

SEQ ID NO: 9419 - DNA, 15 bp, synthetic construct
  source 1..15: mol_type = other DNA
gacccatgaataagt

SEQ ID NO: 9420 - DNA, 15 bp, synthetic construct
  source 1..15: mol_type = other DNA
tgcagactttccaaa

SEQ ID NO: 9421 - DNA, 15 bp, synthetic construct
  source 1..15: mol_type = other DNA
atgcttattcatggc

SEQ ID NO: 9422 - DNA, 15 bp, synthetic construct
  source 1..15: mol_type = other DNA
ggttcggcagaatct

SEQ ID NO: 9423 - DNA, 15 bp, synthetic construct
  source 1..15: mol_type = other DNA
ctgtgagaatacact

SEQ ID NO: 9424 - DNA, 15 bp, synthetic construct
  source 1..15: mol_type = other DNA
atctccatgtttcat

SEQ ID NO: 9425 - DNA, 15 bp, synthetic construct
  source 1..15: mol_type = other DNA
tggttgaactattac

SEQ ID NO: 9426 - DNA, 15 bp, synthetic construct
  source 1..15: mol_type = other DNA
aaactctgttcgata

SEQ ID NO: 9427 - DNA, 15 bp, synthetic construct
  source 1..15: mol_type = other DNA
caagtctctgtggac

SEQ ID NO: 9428 - DNA, 15 bp, synthetic construct
  source 1..15: mol_type = other DNA
cccagtgataaccag

SEQ ID NO: 9429 - DNA, 15 bp, synthetic construct
  source 1..15: mol_type = other DNA
gcattcctccgatcg

SEQ ID NO: 9430 - DNA, 15 bp, synthetic construct
  source 1..15: mol_type = other DNA
ctgcacttgtcggca

SEQ ID NO: 9431 - DNA, 15 bp, synthetic construct
  source 1..15: mol_type = other DNA
tccaacaaagtccca

SEQ ID NO: 9432 - DNA, 15 bp, synthetic construct
  source 1..15: mol_type = other DNA
actgacaatgttgag

SEQ ID NO: 9433 - DNA, 15 bp, synthetic construct
  source 1..15: mol_type = other DNA
tttgatagggaatgc

SEQ ID NO: 9434 - DNA, 15 bp, synthetic construct
  source 1..15: mol_type = other DNA
gttgtaggagtcttc

SEQ ID NO: 9435 - DNA, 15 bp, synthetic construct
  source 1..15: mol_type = other DNA
tggagttcatcctca

SEQ ID NO: 9436 - DNA, 15 bp, synthetic construct
  source 1..15: mol_type = other DNA
tgcatcctctggagt

SEQ ID NO: 9437 - DNA, 15 bp, synthetic construct
  source 1..15: mol_type = other DNA
gccatacactcaggg

SEQ ID NO: 9438 - DNA, 15 bp, synthetic construct
  source 1..15: mol_type = other DNA
gctttggaaagggtg

SEQ ID NO: 9439 - DNA, 15 bp, synthetic construct
  source 1..15: mol_type = other DNA
gggtttctctgtgtc

SEQ ID NO: 9440 - DNA, 15 bp, synthetic construct
  source 1..15: mol_type = other DNA
acttctctcttcaga

SEQ ID NO: 9441 - DNA, 15 bp, synthetic construct
  source 1..15: mol_type = other DNA
gctggacttctgagg

SEQ ID NO: 9442 - DNA, 15 bp, synthetic construct
  source 1..15: mol_type = other DNA
tcacttgaagggtct

SEQ ID NO: 9443 - DNA, 15 bp, synthetic construct
  source 1..15: mol_type = other DNA
gcttttttcctgtct

SEQ ID NO: 9444 - DNA, 15 bp, synthetic construct
  source 1..15: mol_type = other DNA
gccaagtttcccagc

SEQ ID NO: 9445 - DNA, 15 bp, synthetic construct
  source 1..15: mol_type = other DNA
ggcactgccttttgc

SEQ ID NO: 9446 - DNA, 15 bp, synthetic construct
  source 1..15: mol_type = other DNA
cttcggaggtcaaaa

SEQ ID NO: 9447 - DNA, 15 bp, synthetic construct
  source 1..15: mol_type = other DNA
tgaactttcttctca

SEQ ID NO: 9448 - DNA, 15 bp, synthetic construct
  source 1..15: mol_type = other DNA
gtgggtctcgttcag

SEQ ID NO: 9449 - DNA, 15 bp, synthetic construct
  source 1..15: mol_type = other DNA
gctttccttcttaat

SEQ ID NO: 9450 - DNA, 15 bp, synthetic construct
  source 1..15: mol_type = other DNA
tcatagtaccactcc

SEQ ID NO: 9451 - DNA, 15 bp, synthetic construct
  source 1..15: mol_type = other DNA
ggcacttccgaacct

SEQ ID NO: 9452 - DNA, 15 bp, synthetic construct
  source 1..15: mol_type = other DNA
gggagaggcccaact

SEQ ID NO: 9453 - DNA, 15 bp, synthetic construct
  source 1..15: mol_type = other DNA
catcagtgagcttgg

SEQ ID NO: 9454 - DNA, 15 bp, synthetic construct
  source 1..15: mol_type = other DNA
aaggttagcttactg

SEQ ID NO: 9455 - DNA, 15 bp, synthetic construct
  source 1..15: mol_type = other DNA
cttcacagttctagg

SEQ ID NO: 9456 - DNA, 15 bp, synthetic construct
  source 1..15: mol_type = other DNA
gttgaaccagctatt

SEQ ID NO: 9457 - DNA, 15 bp, synthetic construct
  source 1..15: mol_type = other DNA
gcccatttggcagtt

SEQ ID NO: 9458 - DNA, 15 bp, synthetic construct
  source 1..15: mol_type = other DNA
gctgcttcatcacct

SEQ ID NO: 9459 - DNA, 15 bp, synthetic construct
  source 1..15: mol_type = other DNA
catcttgctcttgtg

SEQ ID NO: 9460 - DNA, 15 bp, synthetic construct
  source 1..15: mol_type = other DNA
gccgagttcatgagc

SEQ ID NO: 9461 - DNA, 15 bp, synthetic construct
  source 1..15: mol_type = other DNA
tgcatttgcttcaat

SEQ ID NO: 9462 - DNA, 15 bp, synthetic construct
  source 1..15: mol_type = other DNA
caggtccatcaaaag

SEQ ID NO: 9463 - DNA, 15 bp, synthetic construct
  source 1..15: mol_type = other DNA
cactatttctccgct

SEQ ID NO: 9464 - DNA, 15 bp, synthetic construct
  source 1..15: mol_type = other DNA
atctctgtcggcaaa

SEQ ID NO: 9465 - DNA, 15 bp, synthetic construct
  source 1..15: mol_type = other DNA
tttgtgttagaagag

SEQ ID NO: 9466 - DNA, 15 bp, synthetic construct
  source 1..15: mol_type = other DNA
cagtgttttcctcag

SEQ ID NO: 9467 - DNA, 15 bp, synthetic construct
  source 1..15: mol_type = other DNA
catctgctcttggca

SEQ ID NO: 9468 - DNA, 15 bp, synthetic construct
  source 1..15: mol_type = other DNA
ctttggactcacacc

SEQ ID NO: 9469 - DNA, 15 bp, synthetic construct
  source 1..15: mol_type = other DNA
accactgaaggtgta

SEQ ID NO: 9470 - DNA, 15 bp, synthetic construct
  source 1..15: mol_type = other DNA
aggtgtgacattact

SEQ ID NO: 9471 - DNA, 15 bp, synthetic construct
  source 1..15: mol_type = other DNA
gcatactggcctttg

SEQ ID NO: 9472 - DNA, 15 bp, synthetic construct
  source 1..15: mol_type = other DNA
caaaatgagcatccc

SEQ ID NO: 9473 - DNA, 15 bp, synthetic construct
  source 1..15: mol_type = other DNA
ttcatgaaaactgca

SEQ ID NO: 9474 - DNA, 15 bp, synthetic construct
  source 1..15: mol_type = other DNA
ggatgccatcaatgt

SEQ ID NO: 9475 - DNA, 15 bp, synthetic construct
  source 1..15: mol_type = other DNA
ttccgggtagaaggg

SEQ ID NO: 9476 - DNA, 15 bp, synthetic construct
  source 1..15: mol_type = other DNA
tgtgctatcattttg

SEQ ID NO: 9477 - DNA, 15 bp, synthetic construct
  source 1..15: mol_type = other DNA
ctgggatcaacgtca

SEQ ID NO: 9478 - DNA, 15 bp, synthetic construct
  source 1..15: mol_type = other DNA
gtgggagataacctg

SEQ ID NO: 9479 - DNA, 15 bp, synthetic construct
  source 1..15: mol_type = other DNA
tttgcccgtggttat

SEQ ID NO: 9480 - DNA, 15 bp, synthetic construct
  source 1..15: mol_type = other DNA
ccacaagcttgatag

SEQ ID NO: 9481 - DNA, 15 bp, synthetic construct
  source 1..15: mol_type = other DNA
cttgacaacatttgc

SEQ ID NO: 9482 - DNA, 15 bp, synthetic construct
  source 1..15: mol_type = other DNA
gcctggttggtgtgt

SEQ ID NO: 9483 - DNA, 15 bp, synthetic construct
  source 1..15: mol_type = other DNA
aagagtcagtttcat

SEQ ID NO: 9484 - DNA, 15 bp, synthetic construct
  source 1..15: mol_type = other DNA
tgatacgtctttcta

SEQ ID NO: 9485 - DNA, 15 bp, synthetic construct
  source 1..15: mol_type = other DNA
cagttgaagagcctg

SEQ ID NO: 9486 - DNA, 15 bp, synthetic construct
  source 1..15: mol_type = other DNA
gggacataagtgacc

SEQ ID NO: 9487 - DNA, 15 bp, synthetic construct
  source 1..15: mol_type = other DNA
ccttctagggaggag

SEQ ID NO: 9488 - DNA, 15 bp, synthetic construct
  source 1..15: mol_type = other DNA
actttagactcaatg

SEQ ID NO: 9489 - DNA, 15 bp, synthetic construct
  source 1..15: mol_type = other DNA
actcagtgacattat

SEQ ID NO: 9490 - DNA, 15 bp, synthetic construct
  source 1..15: mol_type = other DNA
tttctgtagggtttt

SEQ ID NO: 9491 - DNA, 15 bp, synthetic construct
  source 1..15: mol_type = other DNA
cacctccaatccaat

SEQ ID NO: 9492 - DNA, 15 bp, synthetic construct
  source 1..15: mol_type = other DNA
ccggcctatcaggac

SEQ ID NO: 9493 - DNA, 15 bp, synthetic construct
  source 1..15: mol_type = other DNA
tttgctggtattttc

SEQ ID NO: 9494 - DNA, 15 bp, synthetic construct
  source 1..15: mol_type = other DNA
gtctgagtgatgctc

SEQ ID NO: 9495 - DNA, 15 bp, synthetic construct
  source 1..15: mol_type = other DNA
catctctgggaatac

SEQ ID NO: 9496 - DNA, 15 bp, synthetic construct
  source 1..15: mol_type = other DNA
ctccgccgacatgac

SEQ ID NO: 9497 - DNA, 15 bp, synthetic construct
  source 1..15: mol_type = other DNA
ttggcacggatgccg

SEQ ID NO: 9498 - DNA, 15 bp, synthetic construct
  source 1..15: mol_type = other DNA
gttgacatttcggcc

SEQ ID NO: 9499 - DNA, 15 bp, synthetic construct
  source 1..15: mol_type = other DNA
gtgttttgtagcgta

SEQ ID NO: 9500 - DNA, 15 bp, synthetic construct
  source 1..15: mol_type = other DNA
gtgctttcgaggtcc

SEQ ID NO: 9501 - DNA, 15 bp, synthetic construct
  source 1..15: mol_type = other DNA
aattggaaaggacca

SEQ ID NO: 9502 - DNA, 15 bp, synthetic construct
  source 1..15: mol_type = other DNA
tgccctgtttgattt

SEQ ID NO: 9503 - DNA, 15 bp, synthetic construct
  source 1..15: mol_type = other DNA
tctgcttgacctggt

SEQ ID NO: 9504 - DNA, 15 bp, synthetic construct
  source 1..15: mol_type = other DNA
tcagagacttctcca

SEQ ID NO: 9505 - DNA, 15 bp, synthetic construct
  source 1..15: mol_type = other DNA
aattacgatggtcct

SEQ ID NO: 9506 - DNA, 15 bp, synthetic construct
  source 1..15: mol_type = other DNA
cttggcaagtagctc

SEQ ID NO: 9507 - DNA, 15 bp, synthetic construct
  source 1..15: mol_type = other DNA
ccacccggtgcacat

SEQ ID NO: 9508 - DNA, 15 bp, synthetic construct
  source 1..15: mol_type = other DNA
ccctgtgacccgtat

SEQ ID NO: 9509 - DNA, 15 bp, synthetic construct
  source 1..15: mol_type = other DNA
tgctaatctgatcga

SEQ ID NO: 9510 - DNA, 15 bp, synthetic construct
  source 1..15: mol_type = other DNA
agatcagagaggcta

SEQ ID NO: 9511 - DNA, 15 bp, synthetic construct
  source 1..15: mol_type = other DNA
tctcccttgatgtgg

SEQ ID NO: 9512 - DNA, 15 bp, synthetic construct
  source 1..15: mol_type = other DNA
tgctgccaatgttga

SEQ ID NO: 9513 - DNA, 15 bp, synthetic construct
  source 1..15: mol_type = other DNA
gtgaagaggaaccaa

SEQ ID NO: 9514 - DNA, 15 bp, synthetic construct
  source 1..15: mol_type = other DNA
ctgaacagcaagctc

SEQ ID NO: 9515 - DNA, 15 bp, synthetic construct
  source 1..15: mol_type = other DNA
tctaaatagagcttc

SEQ ID NO: 9516 - DNA, 15 bp, synthetic construct
  source 1..15: mol_type = other DNA
cccatgtggttacag

SEQ ID NO: 9517 - DNA, 15 bp, synthetic construct
  source 1..15: mol_type = other DNA
ggcgagtccatgatg

SEQ ID NO: 9518 - DNA, 15 bp, synthetic construct
  source 1..15: mol_type = other DNA
tctgttttgcaaaga

SEQ ID NO: 9519 - DNA, 15 bp, synthetic construct
  source 1..15: mol_type = other DNA
gtccacatcggcttg

SEQ ID NO: 9520 - DNA, 15 bp, synthetic construct
  source 1..15: mol_type = other DNA
caccgcccgacattc

SEQ ID NO: 9521 - DNA, 15 bp, synthetic construct
  source 1..15: mol_type = other DNA
accctatgtaaggca

SEQ ID NO: 9522 - DNA, 15 bp, synthetic construct
  source 1..15: mol_type = other DNA
ctgttgcacctcaac

SEQ ID NO: 9523 - DNA, 15 bp, synthetic construct
  source 1..15: mol_type = other DNA
acgtcaagagacagg

SEQ ID NO: 9524 - DNA, 15 bp, synthetic construct
  source 1..15: mol_type = other DNA
ggttggtttaatccc

SEQ ID NO: 9525 - DNA, 15 bp, synthetic construct
  source 1..15: mol_type = other DNA
gcattccagtccttc

SEQ ID NO: 9526 - DNA, 15 bp, synthetic construct
  source 1..15: mol_type = other DNA
ctcaccctccactta

SEQ ID NO: 9527 - DNA, 15 bp, synthetic construct
  source 1..15: mol_type = other DNA
cccaaccaaaacagt

SEQ ID NO: 9528 - DNA, 15 bp, synthetic construct
  source 1..15: mol_type = other DNA
cactcataatctgag

SEQ ID NO: 9529 - DNA, 15 bp, synthetic construct
  source 1..15: mol_type = other DNA
tctccacgaagccat

SEQ ID NO: 9530 - DNA, 15 bp, synthetic construct
  source 1..15: mol_type = other DNA
ggagggcggaactaa

SEQ ID NO: 9531 - DNA, 15 bp, synthetic construct
  source 1..15: mol_type = other DNA
ctggcatatgtagcc

SEQ ID NO: 9532 - DNA, 15 bp, synthetic construct
  source 1..15: mol_type = other DNA
gtaaccagttcaaat

SEQ ID NO: 9533 - DNA, 15 bp, synthetic construct
  source 1..15: mol_type = other DNA
caccaaaattcctct

SEQ ID NO: 9534 - DNA, 15 bp, synthetic construct
  source 1..15: mol_type = other DNA
tagcattgatactac

SEQ ID NO: 9535 - DNA, 15 bp, synthetic construct
  source 1..15: mol_type = other DNA
ccctccaaagcctat

SEQ ID NO: 9536 - DNA, 15 bp, synthetic construct
  source 1..15: mol_type = other DNA
agctaagtctccacc

SEQ ID NO: 9537 - DNA, 15 bp, synthetic construct
  source 1..15: mol_type = other DNA
tgtggcccaagacac

SEQ ID NO: 9538 - DNA, 15 bp, synthetic construct
  source 1..15: mol_type = other DNA
ccattggcattgcct

SEQ ID NO: 9539 - DNA, 15 bp, synthetic construct
  source 1..15: mol_type = other DNA
agctcagcgttctgt

SEQ ID NO: 9540 - DNA, 15 bp, synthetic construct
  source 1..15: mol_type = other DNA
ttccaagacatagta

SEQ ID NO: 9541 - DNA, 15 bp, synthetic construct
  source 1..15: mol_type = other DNA
tcctggttgcaagct

SEQ ID NO: 9542 - DNA, 15 bp, synthetic construct
  source 1..15: mol_type = other DNA
tccagaatgctggct

SEQ ID NO: 9543 - DNA, 15 bp, synthetic construct
  source 1..15: mol_type = other DNA
tggtttgcttctgca

SEQ ID NO: 9544 - DNA, 15 bp, synthetic construct
  source 1..15: mol_type = other DNA
ccatccgtccaaagg

SEQ ID NO: 9545 - DNA, 15 bp, synthetic construct
  source 1..15: mol_type = other DNA
caatcctccggacat

SEQ ID NO: 9546 - DNA, 15 bp, synthetic construct
  source 1..15: mol_type = other DNA
tgggtgaaccgaacc

SEQ ID NO: 9547 - DNA, 15 bp, synthetic construct
  source 1..15: mol_type = other DNA
cttgtaacagtgacc

SEQ ID NO: 9548 - DNA, 15 bp, synthetic construct
  source 1..15: mol_type = other DNA
tgatttcatcttgca

SEQ ID NO: 9549 - DNA, 15 bp, synthetic construct
  source 1..15: mol_type = other DNA
gtgacacacagcttt

SEQ ID NO: 9550 - DNA, 15 bp, synthetic construct
  source 1..15: mol_type = other DNA
ggcaatgtggaagag

SEQ ID NO: 9551 - DNA, 15 bp, synthetic construct
  source 1..15: mol_type = other DNA
gaagaaggcaaagat

SEQ ID NO: 9552 - DNA, 15 bp, synthetic construct
  source 1..15: mol_type = other DNA
ttctcaacgatgcca

SEQ ID NO: 9553 - DNA, 15 bp, synthetic construct
  source 1..15: mol_type = other DNA
agcgtgacaacacaa

SEQ ID NO: 9554 - DNA, 15 bp, synthetic construct
  source 1..15: mol_type = other DNA
ttgtcagtctcttcc

SEQ ID NO: 9555 - DNA, 15 bp, synthetic construct
  source 1..15: mol_type = other DNA
cccatttactgaatt

SEQ ID NO: 9556 - DNA, 15 bp, synthetic construct
  source 1..15: mol_type = other DNA
tgctcctactatgtc

SEQ ID NO: 9557 - DNA, 15 bp, synthetic construct
  source 1..15: mol_type = other DNA
gtgttggctatttag

SEQ ID NO: 9558 - DNA, 15 bp, synthetic construct
  source 1..15: mol_type = other DNA
caaggcctcaaatct

SEQ ID NO: 9559 - DNA, 15 bp, synthetic construct
  source 1..15: mol_type = other DNA
agggattagctggtt

SEQ ID NO: 9560 - DNA, 15 bp, synthetic construct
  source 1..15: mol_type = other DNA
gcataatggctaaaa

SEQ ID NO: 9561 - DNA, 15 bp, synthetic construct
  source 1..15: mol_type = other DNA
ggactccaccaaaaa

SEQ ID NO: 9562 - DNA, 15 bp, synthetic construct
  source 1..15: mol_type = other DNA
ctgcggagttcagtg

SEQ ID NO: 9563 - DNA, 15 bp, synthetic construct
  source 1..15: mol_type = other DNA
cttttccattcattc

SEQ ID NO: 9564 - DNA, 15 bp, synthetic construct
  source 1..15: mol_type = other DNA
tccgagtgaccttgg

SEQ ID NO: 9565 - DNA, 15 bp, synthetic construct
  source 1..15: mol_type = other DNA
ttggcagtcttacct

SEQ ID NO: 9566 - DNA, 15 bp, synthetic construct
  source 1..15: mol_type = other DNA
cattccagaaatggc

SEQ ID NO: 9567 - DNA, 15 bp, synthetic construct
  source 1..15: mol_type = other DNA
ttggttgggaagatg

SEQ ID NO: 9568 - DNA, 15 bp, synthetic construct
  source 1..15: mol_type = other DNA
tcttgataaaagctg

SEQ ID NO: 9569 - DNA, 15 bp, synthetic construct
  source 1..15: mol_type = other DNA
ccagatagagatgtg

SEQ ID NO: 9570 - DNA, 15 bp, synthetic construct
  source 1..15: mol_type = other DNA
catagatccctgctg

SEQ ID NO: 9571 - DNA, 15 bp, synthetic construct
  source 1..15: mol_type = other DNA
acctcaccgttcaaa

SEQ ID NO: 9572 - DNA, 15 bp, synthetic construct
  source 1..15: mol_type = other DNA
caagaaatgaaagtc

SEQ ID NO: 9573 - DNA, 15 bp, synthetic construct
  source 1..15: mol_type = other DNA
gtgggagttaggaaa

SEQ ID NO: 9574 - DNA, 15 bp, synthetic construct
  source 1..15: mol_type = other DNA
gcaatgagatagaca

SEQ ID NO: 9575 - DNA, 15 bp, synthetic construct
  source 1..15: mol_type = other DNA
tgcccggtgtcatgg

SEQ ID NO: 9576 - DNA, 15 bp, synthetic construct
  source 1..15: mol_type = other DNA
ggaaagatgtccagc

SEQ ID NO: 9577 - DNA, 15 bp, synthetic construct
  source 1..15: mol_type = other DNA
cagaacccgtaacaa

SEQ ID NO: 9578 - DNA, 15 bp, synthetic construct
  source 1..15: mol_type = other DNA
ctgaacttctctggg

SEQ ID NO: 9579 - DNA, 15 bp, synthetic construct
  source 1..15: mol_type = other DNA
gtactcgctcatagg

SEQ ID NO: 9580 - DNA, 15 bp, synthetic construct
  source 1..15: mol_type = other DNA
ctgagatcgtcaggt

SEQ ID NO: 9581 - DNA, 15 bp, synthetic construct
  source 1..15: mol_type = other DNA
tgtgtctccacgtcg

SEQ ID NO: 9582 - DNA, 15 bp, synthetic construct
  source 1..15: mol_type = other DNA
cttggtagtagtcgg

SEQ ID NO: 9583 - DNA, 15 bp, synthetic construct
  source 1..15: mol_type = other DNA
cagagtcaattgtac

SEQ ID NO: 9584 - DNA, 15 bp, synthetic construct
  source 1..15: mol_type = other DNA
cagcttgactgtgcc

SEQ ID NO: 9585 - DNA, 15 bp, synthetic construct
  source 1..15: mol_type = other DNA
gacgggcgtgtcgta

SEQ ID NO: 9586 - DNA, 15 bp, synthetic construct
  source 1..15: mol_type = other DNA
ctcggtgatgatgct

SEQ ID NO: 9587 - DNA, 15 bp, synthetic construct
  source 1..15: mol_type = other DNA
aaaggtgatgtagtg

SEQ ID NO: 9588 - DNA, 15 bp, synthetic construct
  source 1..15: mol_type = other DNA
tcaccatgatgtggt

SEQ ID NO: 9589 - DNA, 15 bp, synthetic construct
  source 1..15: mol_type = other DNA
gtgcacagcaaattc

SEQ ID NO: 9590 - DNA, 15 bp, synthetic construct
  source 1..15: mol_type = other DNA
acactcatgcggagg

SEQ ID NO: 9591 - DNA, 15 bp, synthetic construct
  source 1..15: mol_type = other DNA
tcaattctgtgtctc

SEQ ID NO: 9592 - DNA, 15 bp, synthetic construct
  source 1..15: mol_type = other DNA
acaggtgtggttccg

SEQ ID NO: 9593 - DNA, 15 bp, synthetic construct
  source 1..15: mol_type = other DNA
gtagactttggtgta

SEQ ID NO: 9594 - DNA, 15 bp, synthetic construct
  source 1..15: mol_type = other DNA
cgtacagctcagtga

SEQ ID NO: 9595 - DNA, 15 bp, synthetic construct
  source 1..15: mol_type = other DNA
ctgaacacgctgctt

SEQ ID NO: 9596 - DNA, 15 bp, synthetic construct
  source 1..15: mol_type = other DNA
gtagtgggtgtcctc

SEQ ID NO: 9597 - DNA, 15 bp, synthetic construct
  source 1..15: mol_type = other DNA
ccaggagagcgtagg

SEQ ID NO: 9598 - DNA, 15 bp, synthetic construct
  source 1..15: mol_type = other DNA
tggaaggtgtacgtc

SEQ ID NO: 9599 - DNA, 15 bp, synthetic construct
  source 1..15: mol_type = other DNA
tggtcaggttgtaca

SEQ ID NO: 9600 - DNA, 15 bp, synthetic construct
  source 1..15: mol_type = other DNA
agcttgatgaacacg

SEQ ID NO: 9601 - DNA, 15 bp, synthetic construct
  source 1..15: mol_type = other DNA
acaggtcgttgttat

SEQ ID NO: 9602 - DNA, 15 bp, synthetic construct
  source 1..15: mol_type = other DNA
ggtgcgtagtaggtg

SEQ ID NO: 9603 - DNA, 15 bp, synthetic construct
  source 1..15: mol_type = other DNA
gggatcctcacacac

SEQ ID NO: 9604 - DNA, 15 bp, synthetic construct
  source 1..15: mol_type = other DNA
gcccggtgtgtacag

SEQ ID NO: 9605 - DNA, 15 bp, synthetic construct
  source 1..15: mol_type = other DNA
cccacccgtgtcaca

SEQ ID NO: 9606 - DNA, 15 bp, synthetic construct
  source 1..15: mol_type = other DNA
gctcgttgagcagta

SEQ ID NO: 9607 - DNA, 15 bp, synthetic construct
  source 1..15: mol_type = other DNA
gcgggtgaggtagat

SEQ ID NO: 9608 - DNA, 15 bp, synthetic construct
  source 1..15: mol_type = other DNA
gttgtagacgcaggc

SEQ ID NO: 9609 - DNA, 15 bp, synthetic construct
  source 1..15: mol_type = other DNA
gctacacagggcata

SEQ ID NO: 9610 - DNA, 15 bp, synthetic construct
  source 1..15: mol_type = other DNA
gcaaagtcattaacg

SEQ ID NO: 9611 - DNA, 15 bp, synthetic construct
  source 1..15: mol_type = other DNA
acccgtgccatccgt

SEQ ID NO: 9612 - DNA, 15 bp, synthetic construct
  source 1..15: mol_type = other DNA
gcaggttcccgaatt

SEQ ID NO: 9613 - DNA, 15 bp, synthetic construct
  source 1..15: mol_type = other DNA
gctgagcaggtcggt

SEQ ID NO: 9614 - DNA, 15 bp, synthetic construct
  source 1..15: mol_type = other DNA
tgtcgtgggacgcac

SEQ ID NO: 9615 - DNA, 15 bp, synthetic construct
  source 1..15: mol_type = other DNA
gtgctggttgtcacc

SEQ ID NO: 9616 - DNA, 15 bp, synthetic construct
  source 1..15: mol_type = other DNA
cccatctgccggatg

SEQ ID NO: 9617 - DNA, 15 bp, synthetic construct
  source 1..15: mol_type = other DNA
gcagaagtagttgtc

SEQ ID NO: 9618 - DNA, 15 bp, synthetic construct
  source 1..15: mol_type = other DNA
gggacgttctcggtg

SEQ ID NO: 9619 - DNA, 15 bp, synthetic construct
  source 1..15: mol_type = other DNA
ggtgttgttggcaaa

SEQ ID NO: 9620 - DNA, 15 bp, synthetic construct
  source 1..15: mol_type = other DNA
cccacaggtcttgtt

SEQ ID NO: 9621 - DNA, 15 bp, synthetic construct
  source 1..15: mol_type = other DNA
tgggcgatgatgaag

SEQ ID NO: 9622 - DNA, 15 bp, synthetic construct
  source 1..15: mol_type = other DNA
ctgggtgtagatctg

SEQ ID NO: 9623 - DNA, 15 bp, synthetic construct
  source 1..15: mol_type = other DNA
cactgcatcttgtcc

SEQ ID NO: 9624 - DNA, 15 bp, synthetic construct
  source 1..15: mol_type = other DNA
ggctgtcatcgtggt

SEQ ID NO: 9625 - DNA, 15 bp, synthetic construct
  source 1..15: mol_type = other DNA
gtacatcttgacgcc

SEQ ID NO: 9626 - DNA, 15 bp, synthetic construct
  source 1..15: mol_type = other DNA
gacatggtagtggta

SEQ ID NO: 9627 - DNA, 15 bp, synthetic construct
  source 1..15: mol_type = other DNA
ggaagtcatcggcct

SEQ ID NO: 9628 - DNA, 15 bp, synthetic construct
  source 1..15: mol_type = other DNA
ggcgtggcatttcgg

SEQ ID NO: 9629 - DNA, 15 bp, synthetic construct
  source 1..15: mol_type = other DNA
cagcgtgtactcgca

SEQ ID NO: 9630 - DNA, 15 bp, synthetic construct
  source 1..15: mol_type = other DNA
gacatctcggagcag

SEQ ID NO: 9631 - DNA, 15 bp, synthetic construct
  source 1..15: mol_type = other DNA
gtgcaccgtgtattg

SEQ ID NO: 9632 - DNA, 15 bp, synthetic construct
  source 1..15: mol_type = other DNA
ctcggtcggtcttat

SEQ ID NO: 9633 - DNA, 15 bp, synthetic construct
  source 1..15: mol_type = other DNA
cgtggttgtggtagt

SEQ ID NO: 9634 - DNA, 15 bp, synthetic construct
  source 1..15: mol_type = other DNA
ggcacaaggttgtgg

SEQ ID NO: 9635 - DNA, 15 bp, synthetic construct
  source 1..15: mol_type = other DNA
gccgtagttgcagca

SEQ ID NO: 9636 - DNA, 15 bp, synthetic construct
  source 1..15: mol_type = other DNA
gggacaggtagtatt

SEQ ID NO: 9637 - DNA, 15 bp, synthetic construct
  source 1..15: mol_type = other DNA
gctgcagttgtagtg

SEQ ID NO: 9638 - DNA, 15 bp, synthetic construct
  source 1..15: mol_type = other DNA
gtgcttgtcagcact

SEQ ID NO: 9639 - DNA, 15 bp, synthetic construct
  source 1..15: mol_type = other DNA
ggaggtgtggattgt

SEQ ID NO: 9640 - DNA, 15 bp, synthetic construct
  source 1..15: mol_type = other DNA
gaaggtgccattgta

SEQ ID NO: 9641 - DNA, 15 bp, synthetic construct
  source 1..15: mol_type = other DNA
cccgtggttgtggta

SEQ ID NO: 9642 - DNA, 15 bp, synthetic construct
  source 1..15: mol_type = other DNA
gcacggatgttggag

SEQ ID NO: 9643 - DNA, 15 bp, synthetic construct
  source 1..15: mol_type = other DNA
gacccggatcctgta

SEQ ID NO: 9644 - DNA, 15 bp, synthetic construct
  source 1..15: mol_type = other DNA
cggccctgatcttat

SEQ ID NO: 9645 - DNA, 15 bp, synthetic construct
  source 1..15: mol_type = other DNA
aggacacagtggaca

SEQ ID NO: 9646 - DNA, 15 bp, synthetic construct
  source 1..15: mol_type = other DNA
tgtgtgctagaggag

SEQ ID NO: 9647 - DNA, 15 bp, synthetic construct
  source 1..15: mol_type = other DNA
acatggaactggtgg

SEQ ID NO: 9648 - DNA, 15 bp, synthetic construct
  source 1..15: mol_type = other DNA
gatggtgccgttgct

SEQ ID NO: 9649 - DNA, 15 bp, synthetic construct
  source 1..15: mol_type = other DNA
aagcggtcaatgtca

SEQ ID NO: 9650 - DNA, 15 bp, synthetic construct
  source 1..15: mol_type = other DNA
gcggtaagcactgtg

SEQ ID NO: 9651 - DNA, 15 bp, synthetic construct
  source 1..15: mol_type = other DNA
gacagctcgctcgtg

SEQ ID NO: 9652 - DNA, 15 bp, synthetic construct
  source 1..15: mol_type = other DNA
tggtagctgtaggtc

SEQ ID NO: 9653 - DNA, 15 bp, synthetic construct
  source 1..15: mol_type = other DNA
agtggtcgctgatgc

SEQ ID NO: 9654 - DNA, 15 bp, synthetic construct
  source 1..15: mol_type = other DNA
tccagtggactcagt

SEQ ID NO: 9655 - DNA, 15 bp, synthetic construct
  source 1..15: mol_type = other DNA
gtggtagttggcact

SEQ ID NO: 9656 - DNA, 15 bp, synthetic construct
  source 1..15: mol_type = other DNA
ctccagaatcgggtt

SEQ ID NO: 9657 - DNA, 15 bp, synthetic construct
  source 1..15: mol_type = other DNA
gcattttgttggtcc

SEQ ID NO: 9658 - DNA, 15 bp, synthetic construct
  source 1..15: mol_type = other DNA
ctgatcatccatgac

SEQ ID NO: 9659 - DNA, 15 bp, synthetic construct
  source 1..15: mol_type = other DNA
ggttctcgatctcct

SEQ ID NO: 9660 - DNA, 15 bp, synthetic construct
  source 1..15: mol_type = other DNA
aatggatgatggaga

SEQ ID NO: 9661 - DNA, 15 bp, synthetic construct
  source 1..15: mol_type = other DNA
cacgatgtaacccgt

SEQ ID NO: 9662 - DNA, 15 bp, synthetic construct
  source 1..15: mol_type = other DNA
agcctcatgggaccg

SEQ ID NO: 9663 - DNA, 15 bp, synthetic construct
  source 1..15: mol_type = other DNA
tatattagccctgag

SEQ ID NO: 9664 - DNA, 15 bp, synthetic construct
  source 1..15: mol_type = other DNA
aagaggaacttctca

SEQ ID NO: 9665 - DNA, 15 bp, synthetic construct
  source 1..15: mol_type = other DNA
gcgagtgcttctgtt

SEQ ID NO: 9666 - DNA, 15 bp, synthetic construct
  source 1..15: mol_type = other DNA
gctgcaggaccgatg

SEQ ID NO: 9667 - DNA, 15 bp, synthetic construct
  source 1..15: mol_type = other DNA
gtgatacttgtgtct

SEQ ID NO: 9668 - DNA, 15 bp, synthetic construct
  source 1..15: mol_type = other DNA
ccaagtagccacgac

SEQ ID NO: 9669 - DNA, 15 bp, synthetic construct
  source 1..15: mol_type = other DNA
gccacaaacttgtcg

SEQ ID NO: 9670 - DNA, 15 bp, synthetic construct
  source 1..15: mol_type = other DNA
tctcgcccaaccttg

SEQ ID NO: 9671 - DNA, 15 bp, synthetic construct
  source 1..15: mol_type = other DNA
ggatcttcttcaggg

SEQ ID NO: 9672 - DNA, 15 bp, synthetic construct
  source 1..15: mol_type = other DNA
tgttgcgtagcgtgg

SEQ ID NO: 9673 - DNA, 15 bp, synthetic construct
  source 1..15: mol_type = other DNA
gggatggcattcgcc

SEQ ID NO: 9674 - DNA, 15 bp, synthetic construct
  source 1..15: mol_type = other DNA
gttaagtcactaatc

SEQ ID NO: 9675 - DNA, 15 bp, synthetic construct
  source 1..15: mol_type = other DNA
gcccttgtacatgtc

SEQ ID NO: 9676 - DNA, 15 bp, synthetic construct
  source 1..15: mol_type = other DNA
ctggcttggcgaatt

SEQ ID NO: 9677 - DNA, 15 bp, synthetic construct
  source 1..15: mol_type = other DNA
ggtgagtatccagcg

SEQ ID NO: 9678 - DNA, 15 bp, synthetic construct
  source 1..15: mol_type = other DNA
aaagccattggagag

SEQ ID NO: 9679 - DNA, 15 bp, synthetic construct
  source 1..15: mol_type = other DNA
cggcgcagttcctct

SEQ ID NO: 9680 - DNA, 15 bp, synthetic construct
  source 1..15: mol_type = other DNA
ccattctcgctgttc

SEQ ID NO: 9681 - DNA, 15 bp, synthetic construct
  source 1..15: mol_type = other DNA
cttggtatctttcat

SEQ ID NO: 9682 - DNA, 15 bp, synthetic construct
  source 1..15: mol_type = other DNA
ttgagcgggctggtt

SEQ ID NO: 9683 - DNA, 15 bp, synthetic construct
  source 1..15: mol_type = other DNA
gagatcattgccata

SEQ ID NO: 9684 - DNA, 15 bp, synthetic construct
  source 1..15: mol_type = other DNA
gtggctagttccttc

SEQ ID NO: 9685 - DNA, 15 bp, synthetic construct
  source 1..15: mol_type = other DNA
tcctaatctctcctc

SEQ ID NO: 9686 - DNA, 15 bp, synthetic construct
  source 1..15: mol_type = other DNA
cttcatccggtcctt

SEQ ID NO: 9687 - DNA, 15 bp, synthetic construct
  source 1..15: mol_type = other DNA
atcgcgaatggtctt

SEQ ID NO: 9688 - DNA, 15 bp, synthetic construct
  source 1..15: mol_type = other DNA
gggcaggtttctttt

SEQ ID NO: 9689 - DNA, 15 bp, synthetic construct
  source 1..15: mol_type = other DNA
gttcagtattgattg

SEQ ID NO: 9690 - DNA, 15 bp, synthetic construct
  source 1..15: mol_type = other DNA
tccatacacgttgat

SEQ ID NO: 9691 - DNA, 15 bp, synthetic construct
  source 1..15: mol_type = other DNA
ttcaggtttctctcc

SEQ ID NO: 9692 - DNA, 15 bp, synthetic construct
  source 1..15: mol_type = other DNA
ctccgaatgtcagag

SEQ ID NO: 9693 - DNA, 15 bp, synthetic construct
  source 1..15: mol_type = other DNA
tcccagatctcgatg

SEQ ID NO: 9694 - DNA, 15 bp, synthetic construct
  source 1..15: mol_type = other DNA
cccatcatatgagga

SEQ ID NO: 9695 - DNA, 15 bp, synthetic construct
  source 1..15: mol_type = other DNA
acacacttgtataag

SEQ ID NO: 9696 - DNA, 15 bp, synthetic construct
  source 1..15: mol_type = other DNA
caatcttgcagtcaa

SEQ ID NO: 9697 - DNA, 15 bp, synthetic construct
  source 1..15: mol_type = other DNA
caaaatgagccgcct

SEQ ID NO: 9698 - DNA, 15 bp, synthetic construct
  source 1..15: mol_type = other DNA
ccgtcatcctgcttg

SEQ ID NO: 9699 - DNA, 15 bp, synthetic construct
  source 1..15: mol_type = other DNA
caatattctgcctgg

SEQ ID NO: 9700 - DNA, 15 bp, synthetic construct
  source 1..15: mol_type = other DNA
gggttggcgcattct

SEQ ID NO: 9701 - DNA, 15 bp, synthetic construct
  source 1..15: mol_type = other DNA
gcctttgtgtttcca

SEQ ID NO: 9702 - DNA, 15 bp, synthetic construct
  source 1..15: mol_type = other DNA
ggagctgaccacatc

SEQ ID NO: 9703 - DNA, 15 bp, synthetic construct
  source 1..15: mol_type = other DNA
tgtaaccacacactt

SEQ ID NO: 9704 - DNA, 15 bp, synthetic construct
  source 1..15: mol_type = other DNA
aatcatcattccaca

SEQ ID NO: 9705 - DNA, 15 bp, synthetic construct
  source 1..15: mol_type = other DNA
gaattccaaggactc

SEQ ID NO: 9706 - DNA, 15 bp, synthetic construct
  source 1..15: mol_type = other DNA
cttttctccattggg

SEQ ID NO: 9707 - DNA, 15 bp, synthetic construct
  source 1..15: mol_type = other DNA
tccactcagctttgt

SEQ ID NO: 9708 - DNA, 15 bp, synthetic construct
  source 1..15: mol_type = other DNA
gtagttcccaaaatc

SEQ ID NO: 9709 - DNA, 15 bp, synthetic construct
  source 1..15: mol_type = other DNA
ttacggcgtacgttg

SEQ ID NO: 9710 - DNA, 15 bp, synthetic construct
  source 1..15: mol_type = other DNA
cgatgttggcgttat

SEQ ID NO: 9711 - DNA, 15 bp, synthetic construct
  source 1..15: mol_type = other DNA
ccaggattctgccct

SEQ ID NO: 9712 - DNA, 15 bp, synthetic construct
  source 1..15: mol_type = other DNA
gtagacctcatactc

SEQ ID NO: 9713 - DNA, 15 bp, synthetic construct
  source 1..15: mol_type = other DNA
tggcatcataccact

SEQ ID NO: 9714 - DNA, 15 bp, synthetic construct
  source 1..15: mol_type = other DNA
caggtaagagtgacc

SEQ ID NO: 9715 - DNA, 15 bp, synthetic construct
  source 1..15: mol_type = other DNA
gctcggtacctgacc

SEQ ID NO: 9716 - DNA, 15 bp, synthetic construct
  source 1..15: mol_type = other DNA
ctgcaggtagttgtt

SEQ ID NO: 9717 - DNA, 15 bp, synthetic construct
  source 1..15: mol_type = other DNA
cagtctggttctcta

SEQ ID NO: 9718 - DNA, 15 bp, synthetic construct
  source 1..15: mol_type = other DNA
gcctgatctctggtt

SEQ ID NO: 9719 - DNA, 15 bp, synthetic construct
  source 1..15: mol_type = other DNA
tcacgttgacggtgg

SEQ ID NO: 9720 - DNA, 15 bp, synthetic construct
  source 1..15: mol_type = other DNA
ccttcggcatcgcac

SEQ ID NO: 9721 - DNA, 15 bp, synthetic construct
  source 1..15: mol_type = other DNA
gcgggagttcatgtc

SEQ ID NO: 9722 - DNA, 15 bp, synthetic construct
  source 1..15: mol_type = other DNA
accttcccgtatccg

SEQ ID NO: 9723 - DNA, 15 bp, synthetic construct
  source 1..15: mol_type = other DNA
agtcttcaaccagga

SEQ ID NO: 9724 - DNA, 15 bp, synthetic construct
  source 1..15: mol_type = other DNA
cccgatagatgcagc

SEQ ID NO: 9725 - DNA, 15 bp, synthetic construct
  source 1..15: mol_type = other DNA
gtgtctagacggcag

SEQ ID NO: 9726 - DNA, 15 bp, synthetic construct
  source 1..15: mol_type = other DNA
cacggcaaaaaggct

SEQ ID NO: 9727 - DNA, 15 bp, synthetic construct
  source 1..15: mol_type = other DNA
gtcattcttcaaaga

SEQ ID NO: 9728 - DNA, 15 bp, synthetic construct
  source 1..15: mol_type = other DNA
cttccctccttgagc

SEQ ID NO: 9729 - DNA, 15 bp, synthetic construct
  source 1..15: mol_type = other DNA
cgagatcacttcggg

SEQ ID NO: 9730 - DNA, 15 bp, synthetic construct
  source 1..15: mol_type = other DNA
cgggatgctctgaca

SEQ ID NO: 9731 - DNA, 15 bp, synthetic construct
  source 1..15: mol_type = other DNA
cagatggtcacttgc

SEQ ID NO: 9732 - DNA, 15 bp, synthetic construct
  source 1..15: mol_type = other DNA
ctcaacaccagcttt

SEQ ID NO: 9733 - DNA, 15 bp, synthetic construct
  source 1..15: mol_type = other DNA
tcacacattctactt

SEQ ID NO: 9734 - DNA, 15 bp, synthetic construct
  source 1..15: mol_type = other DNA
ggagaggaaagaagt

SEQ ID NO: 9735 - DNA, 15 bp, synthetic construct
  source 1..15: mol_type = other DNA
attacagtacagatc

SEQ ID NO: 9736 - DNA, 15 bp, synthetic construct
  source 1..15: mol_type = other DNA
aggttgtctagcgcc

SEQ ID NO: 9737 - DNA, 15 bp, synthetic construct
  source 1..15: mol_type = other DNA
ccattgcgtaattta

SEQ ID NO: 9738 - DNA, 15 bp, synthetic construct
  source 1..15: mol_type = other DNA
agccttcatgcgtct

SEQ ID NO: 9739 - DNA, 15 bp, synthetic construct
  source 1..15: mol_type = other DNA
ggaaatggtgaaact

SEQ ID NO: 9740 - DNA, 15 bp, synthetic construct
  source 1..15: mol_type = other DNA
gctgtccatggtacc

SEQ ID NO: 9741 - DNA, 15 bp, synthetic construct
  source 1..15: mol_type = other DNA
aaactcggcggacgg

SEQ ID NO: 9742 - DNA, 15 bp, synthetic construct
  source 1..15: mol_type = other DNA
ctctcgctgtacgat

SEQ ID NO: 9743 - DNA, 15 bp, synthetic construct
  source 1..15: mol_type = other DNA
gcatgggaaaggtaa

SEQ ID NO: 9744 - DNA, 15 bp, synthetic construct
  source 1..15: mol_type = other DNA
ggtgcaatcagtcag

SEQ ID NO: 9745 - DNA, 15 bp, synthetic construct
  source 1..15: mol_type = other DNA
atgactcgctcatga

SEQ ID NO: 9746 - DNA, 15 bp, synthetic construct
  source 1..15: mol_type = other DNA
ctctgcgttcatggt

SEQ ID NO: 9747 - DNA, 15 bp, synthetic construct
  source 1..15: mol_type = other DNA
gtcctggttctgctc

SEQ ID NO: 9748 - DNA, 15 bp, synthetic construct
  source 1..15: mol_type = other DNA
agatgtagttcttgg

SEQ ID NO: 9749 - DNA, 15 bp, synthetic construct
  source 1..15: mol_type = other DNA
agtcactgtaagcac

SEQ ID NO: 9750 - DNA, 15 bp, synthetic construct
  source 1..15: mol_type = other DNA
gcccttgcaaagcgt

SEQ ID NO: 9751 - DNA, 15 bp, synthetic construct
  source 1..15: mol_type = other DNA
ggcgagccttagtca

SEQ ID NO: 9752 - DNA, 15 bp, synthetic construct
  source 1..15: mol_type = other DNA
aatattgtctatggg

SEQ ID NO: 9753 - DNA, 15 bp, synthetic construct
  source 1..15: mol_type = other DNA
gtatttgcactttgc

SEQ ID NO: 9754 - DNA, 15 bp, synthetic construct
  source 1..15: mol_type = other DNA
cggcggaggcttaac

SEQ ID NO: 9755 - DNA, 15 bp, synthetic construct
  source 1..15: mol_type = other DNA
cgcgtctcttgggct

SEQ ID NO: 9756 - DNA, 15 bp, synthetic construct
  source 1..15: mol_type = other DNA
ccctgtttcttccaa

SEQ ID NO: 9757 - DNA, 15 bp, synthetic construct
  source 1..15: mol_type = other DNA
accggcgcaaaagaa

SEQ ID NO: 9758 - DNA, 15 bp, synthetic construct
  source 1..15: mol_type = other DNA
ggccgggtagtgcta

SEQ ID NO: 9759 - DNA, 15 bp, synthetic construct
  source 1..15: mol_type = other DNA
ctccgtctcacgggt

SEQ ID NO: 9760 - DNA, 15 bp, synthetic construct
  source 1..15: mol_type = other DNA
gctcagcgggcttct

SEQ ID NO: 9761 - DNA, 15 bp, synthetic construct
  source 1..15: mol_type = other DNA
gcaatggctccgaaa

SEQ ID NO: 9762 - DNA, 15 bp, synthetic construct
  source 1..15: mol_type = other DNA
gcggtcgttggcctt

SEQ ID NO: 9763 - DNA, 15 bp, synthetic construct
  source 1..15: mol_type = other DNA
gcgtttgagtcagcg

SEQ ID NO: 9764 - DNA, 15 bp, synthetic construct
  source 1..15: mol_type = other DNA
gcctaaaatgagcgc

SEQ ID NO: 9765 - DNA, 15 bp, synthetic construct
  source 1..15: mol_type = other DNA
gtaagagactgagag

SEQ ID NO: 9766 - DNA, 15 bp, synthetic construct
  source 1..15: mol_type = other DNA
ctgaaatcccggacc

SEQ ID NO: 9767 - DNA, 15 bp, synthetic construct
  source 1..15: mol_type = other DNA
ttgctcagtgccaac

SEQ ID NO: 9768 - DNA, 15 bp, synthetic construct
  source 1..15: mol_type = other DNA
gtcgccttcgtggct

SEQ ID NO: 9769 - DNA, 15 bp, synthetic construct
  source 1..15: mol_type = other DNA
tcctttcacagaaaa

SEQ ID NO: 9770 - DNA, 15 bp, synthetic construct
  source 1..15: mol_type = other DNA
cagaaggaacaagtg

SEQ ID NO: 9771 - DNA, 15 bp, synthetic construct
  source 1..15: mol_type = other DNA
caaacattggattga

SEQ ID NO: 9772 - DNA, 15 bp, synthetic construct
  source 1..15: mol_type = other DNA
ctgtacagagcaaga

SEQ ID NO: 9773 - DNA, 15 bp, synthetic construct
  source 1..15: mol_type = other DNA
tgaggcctttggaat

SEQ ID NO: 9774 - DNA, 15 bp, synthetic construct
  source 1..15: mol_type = other DNA
cctcaaaccagaaat

SEQ ID NO: 9775 - DNA, 15 bp, synthetic construct
  source 1..15: mol_type = other DNA
cagaacagccataat

SEQ ID NO: 9776 - DNA, 15 bp, synthetic construct
  source 1..15: mol_type = other DNA
gtccttagagcccaa

SEQ ID NO: 9777 - DNA, 15 bp, synthetic construct
  source 1..15: mol_type = other DNA
agagtccttacctgc

SEQ ID NO: 9778 - DNA, 15 bp, synthetic construct
  source 1..15: mol_type = other DNA
ctcttaaggtggagg

SEQ ID NO: 9779 - DNA, 15 bp, synthetic construct
  source 1..15: mol_type = other DNA
ggacatcgaagcggc

SEQ ID NO: 9780 - DNA, 15 bp, synthetic construct
  source 1..15: mol_type = other DNA
gaggagacgctgttg

SEQ ID NO: 9781 - DNA, 15 bp, synthetic construct
  source 1..15: mol_type = other DNA
tggtggcgtggtgat

SEQ ID NO: 9782 - DNA, 15 bp, synthetic construct
  source 1..15: mol_type = other DNA
gtccttttgtgcgga

SEQ ID NO: 9783 - DNA, 15 bp, synthetic construct
  source 1..15: mol_type = other DNA
gccatggtgacgtcc

SEQ ID NO: 9784 - DNA, 15 bp, synthetic construct
  source 1..15: mol_type = other DNA
gctgagactcgcttt

SEQ ID NO: 9785 - DNA, 15 bp, synthetic construct
  source 1..15: mol_type = other DNA
ccgccaatctctagg

SEQ ID NO: 9786 - DNA, 15 bp, synthetic construct
  source 1..15: mol_type = other DNA
gggaccagttcgtca

SEQ ID NO: 9787 - DNA, 15 bp, synthetic construct
  source 1..15: mol_type = other DNA
tgacatcatctccca

SEQ ID NO: 9788 - DNA, 15 bp, synthetic construct
  source 1..15: mol_type = other DNA
ttggtgcctttccag

SEQ ID NO: 9789 - DNA, 15 bp, synthetic construct
  source 1..15: mol_type = other DNA
tgctagtggtgtcga

SEQ ID NO: 9790 - DNA, 15 bp, synthetic construct
  source 1..15: mol_type = other DNA
ggttacagatgtagt

SEQ ID NO: 9791 - DNA, 15 bp, synthetic construct
  source 1..15: mol_type = other DNA
ggaaacgatggccac

SEQ ID NO: 9792 - DNA, 15 bp, synthetic construct
  source 1..15: mol_type = other DNA
ttggcatcaaaggcg

SEQ ID NO: 9793 - DNA, 15 bp, synthetic construct
  source 1..15: mol_type = other DNA
gactcggaagtcgtg

SEQ ID NO: 9794 - DNA, 15 bp, synthetic construct
  source 1..15: mol_type = other DNA
gcagaggtttgtgtg

SEQ ID NO: 9795 - DNA, 15 bp, synthetic construct
  source 1..15: mol_type = other DNA
atgctcgtgagccga

SEQ ID NO: 9796 - DNA, 15 bp, synthetic construct
  source 1..15: mol_type = other DNA
agccgctcgatcagg

SEQ ID NO: 9797 - DNA, 15 bp, synthetic construct
  source 1..15: mol_type = other DNA
gaggacgtcttcctc

SEQ ID NO: 9798 - DNA, 15 bp, synthetic construct
  source 1..15: mol_type = other DNA
tggtttgtctggctc

SEQ ID NO: 9799 - DNA, 15 bp, synthetic construct
  source 1..15: mol_type = other DNA
ggtcattgaagactc

SEQ ID NO: 9800 - DNA, 15 bp, synthetic construct
  source 1..15: mol_type = other DNA
ggtggcggagtgatg

SEQ ID NO: 9801 - DNA, 15 bp, synthetic construct
  source 1..15: mol_type = other DNA
ccaggtgcacaatgt

SEQ ID NO: 9802 - DNA, 15 bp, synthetic construct
  source 1..15: mol_type = other DNA
aaccagatggaaaaa

SEQ ID NO: 9803 - DNA, 15 bp, synthetic construct
  source 1..15: mol_type = other DNA
ggagacgcttcatag

SEQ ID NO: 9804 - DNA, 15 bp, synthetic construct
  source 1..15: mol_type = other DNA
tggctcaacaggttt

SEQ ID NO: 9805 - DNA, 15 bp, synthetic construct
  source 1..15: mol_type = other DNA
gagaagacaggcaat

SEQ ID NO: 9806 - DNA, 15 bp, synthetic construct
  source 1..15: mol_type = other DNA
gcactttggcttgtc

SEQ ID NO: 9807 - DNA, 15 bp, synthetic construct
  source 1..15: mol_type = other DNA
cataattgctctgac

SEQ ID NO: 9808 - DNA, 15 bp, synthetic construct
  source 1..15: mol_type = other DNA
attcggtagtagcaa

SEQ ID NO: 9809 - DNA, 15 bp, synthetic construct
  source 1..15: mol_type = other DNA
ggacagagtgtctcc

SEQ ID NO: 9810 - DNA, 15 bp, synthetic construct
  source 1..15: mol_type = other DNA
ttgggacagaagagc

SEQ ID NO: 9811 - DNA, 15 bp, synthetic construct
  source 1..15: mol_type = other DNA
ccattccatatggca

SEQ ID NO: 9812 - DNA, 15 bp, synthetic construct
  source 1..15: mol_type = other DNA
accgtcttctcatgg

SEQ ID NO: 9813 - DNA, 15 bp, synthetic construct
  source 1..15: mol_type = other DNA
ccgactccaagtaca

SEQ ID NO: 9814 - DNA, 15 bp, synthetic construct
  source 1..15: mol_type = other DNA
cgaaggtcaaccttg

SEQ ID NO: 9815 - DNA, 15 bp, synthetic construct
  source 1..15: mol_type = other DNA
tagatacatgagcaa

SEQ ID NO: 9816 - DNA, 15 bp, synthetic construct
  source 1..15: mol_type = other DNA
caaccttgccaaagg

SEQ ID NO: 9817 - DNA, 15 bp, synthetic construct
  source 1..15: mol_type = other DNA
caaaggtaaaaccac

SEQ ID NO: 9818 - DNA, 15 bp, synthetic construct
  source 1..15: mol_type = other DNA
tgaagggtgtggagg

SEQ ID NO: 9819 - DNA, 15 bp, synthetic construct
  source 1..15: mol_type = other DNA
ctctagaagaatttc

SEQ ID NO: 9820 - DNA, 15 bp, synthetic construct
  source 1..15: mol_type = other DNA
agtgaaagggacatc

SEQ ID NO: 9821 - DNA, 15 bp, synthetic construct
  source 1..15: mol_type = other DNA
agggactcagaagca

SEQ ID NO: 9822 - DNA, 15 bp, synthetic construct
  source 1..15: mol_type = other DNA
gtcactttaggtaac

SEQ ID NO: 9823 - DNA, 15 bp, synthetic construct
  source 1..15: mol_type = other DNA
aggaattcagggtgg

SEQ ID NO: 9824 - DNA, 15 bp, synthetic construct
  source 1..15: mol_type = other DNA
cttggtagtatcatt

SEQ ID NO: 9825 - DNA, 15 bp, synthetic construct
  source 1..15: mol_type = other DNA
cccaaatacaggtca

SEQ ID NO: 9826 - DNA, 15 bp, synthetic construct
  source 1..15: mol_type = other DNA
gggtcaatgtcctca

SEQ ID NO: 9827 - DNA, 15 bp, synthetic construct
  source 1..15: mol_type = other DNA
aactttccattcaca

SEQ ID NO: 9828 - DNA, 15 bp, synthetic construct
  source 1..15: mol_type = other DNA
gtcaaaatggtcctg

SEQ ID NO: 9829 - DNA, 15 bp, synthetic construct
  source 1..15: mol_type = other DNA
ctcaaacccagcagt

SEQ ID NO: 9830 - DNA, 15 bp, synthetic construct
  source 1..15: mol_type = other DNA
ctcctcgtgaaacga

SEQ ID NO: 9831 - DNA, 15 bp, synthetic construct
  source 1..15: mol_type = other DNA
attccttgtgcgtgg

SEQ ID NO: 9832 - DNA, 15 bp, synthetic construct
  source 1..15: mol_type = other DNA
acttctcttttcagc

SEQ ID NO: 9833 - DNA, 15 bp, synthetic construct
  source 1..15: mol_type = other DNA
gtgaagcatcagtcc

SEQ ID NO: 9834 - DNA, 15 bp, synthetic construct
  source 1..15: mol_type = other DNA
attcttcaatggcga

SEQ ID NO: 9835 - DNA, 15 bp, synthetic construct
  source 1..15: mol_type = other DNA
aaagggatgcttgcc

SEQ ID NO: 9836 - DNA, 15 bp, synthetic construct
  source 1..15: mol_type = other DNA
gacaagtcgtagcag

SEQ ID NO: 9837 - DNA, 15 bp, synthetic construct
  source 1..15: mol_type = other DNA
caaattaatgaccag

SEQ ID NO: 9838 - DNA, 15 bp, synthetic construct
  source 1..15: mol_type = other DNA
tcaactactcgacca

SEQ ID NO: 9839 - DNA, 15 bp, synthetic construct
  source 1..15: mol_type = other DNA
ggtcgtggtagtctc

SEQ ID NO: 9840 - DNA, 15 bp, synthetic construct
  source 1..15: mol_type = other DNA
tgttgactcagttgt

SEQ ID NO: 9841 - DNA, 15 bp, synthetic construct
  source 1..15: mol_type = other DNA
cgagtcttgagctgg

SEQ ID NO: 9842 - DNA, 15 bp, synthetic construct
  source 1..15: mol_type = other DNA
agggcaagattgaca

SEQ ID NO: 9843 - DNA, 15 bp, synthetic construct
  source 1..15: mol_type = other DNA
tcggtcattaggagg

SEQ ID NO: 9844 - DNA, 15 bp, synthetic construct
  source 1..15: mol_type = other DNA
gaggatgcactttgg

SEQ ID NO: 9845 - DNA, 15 bp, synthetic construct
  source 1..15: mol_type = other DNA
acacttttctcaaga

SEQ ID NO: 9846 - DNA, 15 bp, synthetic construct
  source 1..15: mol_type = other DNA
gccctcgtcgtcgaa

SEQ ID NO: 9847 - DNA, 15 bp, synthetic construct
  source 1..15: mol_type = other DNA
tttcggctgccatat

SEQ ID NO: 9848 - DNA, 15 bp, synthetic construct
  source 1..15: mol_type = other DNA
cgcaccaatacggct

SEQ ID NO: 9849 - DNA, 15 bp, synthetic construct
  source 1..15: mol_type = other DNA
atatgcagttctagg

SEQ ID NO: 9850 - DNA, 15 bp, synthetic construct
  source 1..15: mol_type = other DNA
aagccaagtccgtaa

SEQ ID NO: 9851 - DNA, 15 bp, synthetic construct
  source 1..15: mol_type = other DNA
aggctttgctgtagt

SEQ ID NO: 9852 - DNA, 15 bp, synthetic construct
  source 1..15: mol_type = other DNA
taggaagtttccttc

SEQ ID NO: 9853 - DNA, 15 bp, synthetic construct
  source 1..15: mol_type = other DNA
gttgaaaagccctgc

SEQ ID NO: 9854 - DNA, 15 bp, synthetic construct
  source 1..15: mol_type = other DNA
agctgaaagccagga

SEQ ID NO: 9855 - DNA, 15 bp, synthetic construct
  source 1..15: mol_type = other DNA
cttctgggtttattc

SEQ ID NO: 9856 - DNA, 15 bp, synthetic construct
  source 1..15: mol_type = other DNA
ctctctctagcactt

SEQ ID NO: 9857 - DNA, 15 bp, synthetic construct
  source 1..15: mol_type = other DNA
agaggcgctattact

SEQ ID NO: 9858 - DNA, 15 bp, synthetic construct
  source 1..15: mol_type = other DNA
ttagcagagtcatct

SEQ ID NO: 9859 - DNA, 15 bp, synthetic construct
  source 1..15: mol_type = other DNA
ctgggctgttcaaat

SEQ ID NO: 9860 - DNA, 15 bp, synthetic construct
  source 1..15: mol_type = other DNA
gcttggtcttcagag

SEQ ID NO: 9861 - DNA, 15 bp, synthetic construct
  source 1..15: mol_type = other DNA
ggagtcaacacctgg

SEQ ID NO: 9862 - DNA, 15 bp, synthetic construct
  source 1..15: mol_type = other DNA
ttcctaatttaaggc

SEQ ID NO: 9863 - DNA, 15 bp, synthetic construct
  source 1..15: mol_type = other DNA
gacaaatgtcctaga

SEQ ID NO: 9864 - DNA, 15 bp, synthetic construct
  source 1..15: mol_type = other DNA
cagaacctccgctgc

SEQ ID NO: 9865 - DNA, 15 bp, synthetic construct
  source 1..15: mol_type = other DNA
ttcctgtacaaagaa

SEQ ID NO: 9866 - DNA, 15 bp, synthetic construct
  source 1..15: mol_type = other DNA
ttcaatggcgccacc

SEQ ID NO: 9867 - DNA, 15 bp, synthetic construct
  source 1..15: mol_type = other DNA
tcccggtgttgtaca

SEQ ID NO: 9868 - DNA, 15 bp, synthetic construct
  source 1..15: mol_type = other DNA
agctcgaagtccagt

SEQ ID NO: 9869 - DNA, 15 bp, synthetic construct
  source 1..15: mol_type = other DNA
taagtctggttctaa

SEQ ID NO: 9870 - DNA, 15 bp, synthetic construct
  source 1..15: mol_type = other DNA
tagataagaaaaccc

SEQ ID NO: 9871 - DNA, 15 bp, synthetic construct
  source 1..15: mol_type = other DNA
tttcaccctaactcc

SEQ ID NO: 9872 - DNA, 15 bp, synthetic construct
  source 1..15: mol_type = other DNA
accaaaactctcctt

SEQ ID NO: 9873 - DNA, 15 bp, synthetic construct
  source 1..15: mol_type = other DNA
cctcatcttgtcctc

SEQ ID NO: 9874 - DNA, 15 bp, synthetic construct
  source 1..15: mol_type = other DNA
tgttcatagtacggg

SEQ ID NO: 9875 - DNA, 15 bp, synthetic construct
  source 1..15: mol_type = other DNA
gaaaagaaaaagcag

SEQ ID NO: 9876 - DNA, 15 bp, synthetic construct
  source 1..15: mol_type = other DNA
cacggtcatccacgg

SEQ ID NO: 9877 - DNA, 15 bp, synthetic construct
  source 1..15: mol_type = other DNA
gaattccaagcgttc

SEQ ID NO: 9878 - DNA, 15 bp, synthetic construct
  source 1..15: mol_type = other DNA
gcagatgattcccaa

SEQ ID NO: 9879 - DNA, 15 bp, synthetic construct
  source 1..15: mol_type = other DNA
catggaagaattagt

SEQ ID NO: 9880 - DNA, 15 bp, synthetic construct
  source 1..15: mol_type = other DNA
ctccatgatgtcaat

SEQ ID NO: 9881 - DNA, 15 bp, synthetic construct
  source 1..15: mol_type = other DNA
ggaagaacagaaggg

SEQ ID NO: 9882 - DNA, 15 bp, synthetic construct
  source 1..15: mol_type = other DNA
ctagtgtctcaagct

SEQ ID NO: 9883 - DNA, 15 bp, synthetic construct
  source 1..15: mol_type = other DNA
gatacactcataagt

SEQ ID NO: 9884 - DNA, 15 bp, synthetic construct
  source 1..15: mol_type = other DNA
cagcccagttgtagc

SEQ ID NO: 9885 - DNA, 15 bp, synthetic construct
  source 1..15: mol_type = other DNA
tccgctaggaaagac

SEQ ID NO: 9886 - DNA, 15 bp, synthetic construct
  source 1..15: mol_type = other DNA
tgaccacgctcatgt

SEQ ID NO: 9887 - DNA, 15 bp, synthetic construct
  source 1..15: mol_type = other DNA
gtccagggcgtttcg

SEQ ID NO: 9888 - DNA, 15 bp, synthetic construct
  source 1..15: mol_type = other DNA
ccagtttagcacgaa

SEQ ID NO: 9889 - DNA, 15 bp, synthetic construct
  source 1..15: mol_type = other DNA
ccgtaggatgtccct

SEQ ID NO: 9890 - DNA, 15 bp, synthetic construct
  source 1..15: mol_type = other DNA
ccacagaggtaggtg

SEQ ID NO: 9891 - DNA, 15 bp, synthetic construct
  source 1..15: mol_type = other DNA
gagctcttctgacct

SEQ ID NO: 9892 - DNA, 15 bp, synthetic construct
  source 1..15: mol_type = other DNA
ttcaggaatgggttc

SEQ ID NO: 9893 - DNA, 15 bp, synthetic construct
  source 1..15: mol_type = other DNA
ctgctatctggtgaa

SEQ ID NO: 9894 - DNA, 15 bp, synthetic construct
  source 1..15: mol_type = other DNA
ttgacagagttgttt

SEQ ID NO: 9895 - DNA, 15 bp, synthetic construct
  source 1..15: mol_type = other DNA
tagtagccaccaaaa

SEQ ID NO: 9896 - DNA, 15 bp, synthetic construct
  source 1..15: mol_type = other DNA
aagctgttactgtag

SEQ ID NO: 9897 - DNA, 15 bp, synthetic construct
  source 1..15: mol_type = other DNA
gtactgtccttcgtc

SEQ ID NO: 9898 - DNA, 15 bp, synthetic construct
  source 1..15: mol_type = other DNA
aacgctgacgtttgg

SEQ ID NO: 9899 - DNA, 15 bp, synthetic construct
  source 1..15: mol_type = other DNA
tgacttccagtgtca

SEQ ID NO: 9900 - DNA, 15 bp, synthetic construct
  source 1..15: mol_type = other DNA
attcagcttaaggtt

SEQ ID NO: 9901 - DNA, 15 bp, synthetic construct
  source 1..15: mol_type = other DNA
aggtcaatgctggcc

SEQ ID NO: 9902 - DNA, 15 bp, synthetic construct
  source 1..15: mol_type = other DNA
agagtcaggtacttg

SEQ ID NO: 9903 - DNA, 15 bp, synthetic construct
  source 1..15: mol_type = other DNA
aacaatcaacatgca

SEQ ID NO: 9904 - DNA, 15 bp, synthetic construct
  source 1..15: mol_type = other DNA
gagcttgctttaggc

SEQ ID NO: 9905 - DNA, 15 bp, synthetic construct
  source 1..15: mol_type = other DNA
cagaacactggtgac

SEQ ID NO: 9906 - DNA, 15 bp, synthetic construct
  source 1..15: mol_type = other DNA
gggacatatgaggat

SEQ ID NO: 9907 - DNA, 15 bp, synthetic construct
  source 1..15: mol_type = other DNA
caggccaccgaattc

SEQ ID NO: 9908 - DNA, 15 bp, synthetic construct
  source 1..15: mol_type = other DNA
tgctttcagtctggc

SEQ ID NO: 9909 - DNA, 15 bp, synthetic construct
  source 1..15: mol_type = other DNA
ctctattatgtacag

SEQ ID NO: 9910 - DNA, 15 bp, synthetic construct
  source 1..15: mol_type = other DNA
ggatgaaaatgtgaa

SEQ ID NO: 9911 - DNA, 15 bp, synthetic construct
  source 1..15: mol_type = other DNA
tagtctcaatagcct

SEQ ID NO: 9912 - DNA, 15 bp, synthetic construct
  source 1..15: mol_type = other DNA
ccagatcagtgaagg

SEQ ID NO: 9913 - DNA, 15 bp, synthetic construct
  source 1..15: mol_type = other DNA
caccttttgcaaact

SEQ ID NO: 9914 - DNA, 15 bp, synthetic construct
  source 1..15: mol_type = other DNA
ccagaacacacagct

SEQ ID NO: 9915 - DNA, 15 bp, synthetic construct
  source 1..15: mol_type = other DNA
aagtgcagtagtgct

SEQ ID NO: 9916 - DNA, 15 bp, synthetic construct
  source 1..15: mol_type = other DNA
ttcacttccctcttt

SEQ ID NO: 9917 - DNA, 15 bp, synthetic construct
  source 1..15: mol_type = other DNA
tcaggagtgagaagt

SEQ ID NO: 9918 - DNA, 15 bp, synthetic construct
  source 1..15: mol_type = other DNA
ccctgtgatttggga

SEQ ID NO: 9919 - DNA, 15 bp, synthetic construct
  source 1..15: mol_type = other DNA
gatgcggtcggagta

SEQ ID NO: 9920 - DNA, 15 bp, synthetic construct
  source 1..15: mol_type = other DNA
ggtgatggaaatccg

SEQ ID NO: 9921 - DNA, 15 bp, synthetic construct
  source 1..15: mol_type = other DNA
acggtcggattcggg

SEQ ID NO: 9922 - DNA, 15 bp, synthetic construct
  source 1..15: mol_type = other DNA
cctcttcatctcgcc

SEQ ID NO: 9923 - DNA, 15 bp, synthetic construct
  source 1..15: mol_type = other DNA
gctggtgaccgatga

SEQ ID NO: 9924 - DNA, 15 bp, synthetic construct
  source 1..15: mol_type = other DNA
gcggcgagaatctcc

SEQ ID NO: 9925 - DNA, 15 bp, synthetic construct
  source 1..15: mol_type = other DNA
tgtcgatgaccatct

SEQ ID NO: 9926 - DNA, 15 bp, synthetic construct
  source 1..15: mol_type = other DNA
ggtgattctcgagca

SEQ ID NO: 9927 - DNA, 15 bp, synthetic construct
  source 1..15: mol_type = other DNA
atgtactctgagacc

SEQ ID NO: 9928 - DNA, 15 bp, synthetic construct
  source 1..15: mol_type = other DNA
gtgatccacatcgtg

SEQ ID NO: 9929 - DNA, 15 bp, synthetic construct
  source 1..15: mol_type = other DNA
aagaaatccaccaag

SEQ ID NO: 9930 - DNA, 15 bp, synthetic construct
  source 1..15: mol_type = other DNA
gtcggcacagtgcac

SEQ ID NO: 9931 - DNA, 15 bp, synthetic construct
  source 1..15: mol_type = other DNA
aaatggtgttacgat

SEQ ID NO: 9932 - DNA, 15 bp, synthetic construct
  source 1..15: mol_type = other DNA
tcgctgacagagcga

SEQ ID NO: 9933 - DNA, 15 bp, synthetic construct
  source 1..15: mol_type = other DNA
cgtcagcatgtatgt

SEQ ID NO: 9934 - DNA, 15 bp, synthetic construct
  source 1..15: mol_type = other DNA
gagttgttcaggctg

SEQ ID NO: 9935 - DNA, 15 bp, synthetic construct
  source 1..15: mol_type = other DNA
gccaggagatggtgt

SEQ ID NO: 9936 - DNA, 15 bp, synthetic construct
  source 1..15: mol_type = other DNA
gcggcgcttgctgtt

SEQ ID NO: 9937 - DNA, 15 bp, synthetic construct
  source 1..15: mol_type = other DNA
gggtgatgggatctc

SEQ ID NO: 9938 - DNA, 15 bp, synthetic construct
  source 1..15: mol_type = other DNA
cagcgtaatccgaca

SEQ ID NO: 9939 - DNA, 15 bp, synthetic construct
  source 1..15: mol_type = other DNA
ctcatttctgacagg

SEQ ID NO: 9940 - DNA, 15 bp, synthetic construct
  source 1..15: mol_type = other DNA
ctggaatatcatgta

SEQ ID NO: 9941 - DNA, 15 bp, synthetic construct
  source 1..15: mol_type = other DNA
cagattgtttttcag

SEQ ID NO: 9942 - DNA, 15 bp, synthetic construct
  source 1..15: mol_type = other DNA
gcgggcagcacattc

SEQ ID NO: 9943 - DNA, 15 bp, synthetic construct
  source 1..15: mol_type = other DNA
ttgtaatagcaagtg

SEQ ID NO: 9944 - DNA, 15 bp, synthetic construct
  source 1..15: mol_type = other DNA
ggtgatcatcgacca

SEQ ID NO: 9945 - DNA, 15 bp, synthetic construct
  source 1..15: mol_type = other DNA
tagatgtaaatgtgc

SEQ ID NO: 9946 - DNA, 15 bp, synthetic construct
  source 1..15: mol_type = other DNA
gtttgacttcatgca

SEQ ID NO: 9947 - DNA, 15 bp, synthetic construct
  source 1..15: mol_type = other DNA
gcgaaagtcacacgg

SEQ ID NO: 9948 - DNA, 15 bp, synthetic construct
  source 1..15: mol_type = other DNA
catttctgatttcca

SEQ ID NO: 9949 - DNA, 15 bp, synthetic construct
  source 1..15: mol_type = other DNA
cttagcacggatcag

SEQ ID NO: 9950 - DNA, 15 bp, synthetic construct
  source 1..15: mol_type = other DNA
aattcctcaaatccc

SEQ ID NO: 9951 - DNA, 15 bp, synthetic construct
  source 1..15: mol_type = other DNA
ggagtggatctccgt

SEQ ID NO: 9952 - DNA, 15 bp, synthetic construct
  source 1..15: mol_type = other DNA
cttccaagaccgtca

SEQ ID NO: 9953 - DNA, 15 bp, synthetic construct
  source 1..15: mol_type = other DNA
ttggaaggatagagg

SEQ ID NO: 9954 - DNA, 15 bp, synthetic construct
  source 1..15: mol_type = other DNA
attcaatgaccctcc

SEQ ID NO: 9955 - DNA, 15 bp, synthetic construct
  source 1..15: mol_type = other DNA
gacaaccaggacaat

SEQ ID NO: 9956 - DNA, 15 bp, synthetic construct
  source 1..15: mol_type = other DNA
gctcacttcactctc

SEQ ID NO: 9957 - DNA, 15 bp, synthetic construct
  source 1..15: mol_type = other DNA
ggaccgtcaaagtgt

SEQ ID NO: 9958 - DNA, 15 bp, synthetic construct
  source 1..15: mol_type = other DNA
ctgtgagaagacagc

SEQ ID NO: 9959 - DNA, 15 bp, synthetic construct
  source 1..15: mol_type = other DNA
tcgtccctaacttcc

SEQ ID NO: 9960 - DNA, 15 bp, synthetic construct
  source 1..15: mol_type = other DNA
ctgtagctccaacag

SEQ ID NO: 9961 - DNA, 15 bp, synthetic construct
  source 1..15: mol_type = other DNA
tccgcaatgaatgtc

SEQ ID NO: 9962 - DNA, 15 bp, synthetic construct
  source 1..15: mol_type = other DNA
tgagctacaatagta

SEQ ID NO: 9963 - DNA, 15 bp, synthetic construct
  source 1..15: mol_type = other DNA
tccactcaatatcag

SEQ ID NO: 9964 - DNA, 15 bp, synthetic construct
  source 1..15: mol_type = other DNA
attctcagtactttc

SEQ ID NO: 9965 - DNA, 15 bp, synthetic construct
  source 1..15: mol_type = other DNA
cactgcgttcacaga

SEQ ID NO: 9966 - DNA, 15 bp, synthetic construct
  source 1..15: mol_type = other DNA
ctgtcctcaaagata

SEQ ID NO: 9967 - DNA, 15 bp, synthetic construct
  source 1..15: mol_type = other DNA
cctttggagatgtaa

SEQ ID NO: 9968 - DNA, 15 bp, synthetic construct
  source 1..15: mol_type = other DNA
cacgcgaaccagtgt

SEQ ID NO: 9969 - DNA, 15 bp, synthetic construct
  source 1..15: mol_type = other DNA
ggcattgtagaactg

SEQ ID NO: 9970 - DNA, 15 bp, synthetic construct
  source 1..15: mol_type = other DNA
accttcgcccaacag

SEQ ID NO: 9971 - DNA, 15 bp, synthetic construct
  source 1..15: mol_type = other DNA
agctccgacataagg

SEQ ID NO: 9972 - DNA, 15 bp, synthetic construct
  source 1..15: mol_type = other DNA
cttcacagatgagca

SEQ ID NO: 9973 - DNA, 15 bp, synthetic construct
  source 1..15: mol_type = other DNA
tcatcctgatggtca

SEQ ID NO: 9974 - DNA, 15 bp, synthetic construct
  source 1..15: mol_type = other DNA
gccactttcatcgtg

SEQ ID NO: 9975 - DNA, 15 bp, synthetic construct
  source 1..15: mol_type = other DNA
tctgttactcggcat

SEQ ID NO: 9976 - DNA, 15 bp, synthetic construct
  source 1..15: mol_type = other DNA
cgttgcgcgtggaca

SEQ ID NO: 9977 - DNA, 15 bp, synthetic construct
  source 1..15: mol_type = other DNA
tggagactcgttgat

SEQ ID NO: 9978 - DNA, 15 bp, synthetic construct
  source 1..15: mol_type = other DNA
ccggagccatccact

SEQ ID NO: 9979 - DNA, 15 bp, synthetic construct
  source 1..15: mol_type = other DNA
ccgatcacaatgcac

SEQ ID NO: 9980 - DNA, 15 bp, synthetic construct
  source 1..15: mol_type = other DNA
cgtagttatcgtaag

SEQ ID NO: 9981 - DNA, 15 bp, synthetic construct
  source 1..15: mol_type = other DNA
gatgataagggagat

SEQ ID NO: 9982 - DNA, 15 bp, synthetic construct
  source 1..15: mol_type = other DNA
ggctccaagttgctc

SEQ ID NO: 9983 - DNA, 15 bp, synthetic construct
  source 1..15: mol_type = other DNA
ctttggtaccgtatt

SEQ ID NO: 9984 - DNA, 15 bp, synthetic construct
  source 1..15: mol_type = other DNA
accctcattgggctg

SEQ ID NO: 9985 - DNA, 15 bp, synthetic construct
  source 1..15: mol_type = other DNA
ggagtctgtagacat

SEQ ID NO: 9986 - DNA, 15 bp, synthetic construct
  source 1..15: mol_type = other DNA
tagcggcagtactca

SEQ ID NO: 9987 - DNA, 15 bp, synthetic construct
  source 1..15: mol_type = other DNA
gccgatccacgtgct

SEQ ID NO: 9988 - DNA, 15 bp, synthetic construct
  source 1..15: mol_type = other DNA
acgtagatgtactca

SEQ ID NO: 9989 - DNA, 15 bp, synthetic construct
  source 1..15: mol_type = other DNA
gctgtagcgcgagaa

SEQ ID NO: 9990 - DNA, 15 bp, synthetic construct
  source 1..15: mol_type = other DNA
gggtttgagggtgcc

SEQ ID NO: 9991 - DNA, 15 bp, synthetic construct
  source 1..15: mol_type = other DNA
tctgggcttttctca

SEQ ID NO: 9992 - DNA, 15 bp, synthetic construct
  source 1..15: mol_type = other DNA
gctgtcgtttgtttt

SEQ ID NO: 9993 - DNA, 15 bp, synthetic construct
  source 1..15: mol_type = other DNA
gtggagtatgtataa

SEQ ID NO: 9994 - DNA, 15 bp, synthetic construct
  source 1..15: mol_type = other DNA
ctgatcacagagcat

SEQ ID NO: 9995 - DNA, 15 bp, synthetic construct
  source 1..15: mol_type = other DNA
agaagcaccacaaca

SEQ ID NO: 9996 - DNA, 15 bp, synthetic construct
  source 1..15: mol_type = other DNA
atgagaatctcttac

SEQ ID NO: 9997 - DNA, 15 bp, synthetic construct
  source 1..15: mol_type = other DNA
tttccttcagaatgt

SEQ ID NO: 9998 - DNA, 15 bp, synthetic construct
  source 1..15: mol_type = other DNA
tcaatgcttccaatg

SEQ ID NO: 9999 - DNA, 15 bp, synthetic construct
  source 1..15: mol_type = other DNA
tgattttcctggtgt

SEQ ID NO: 10000 - DNA, 15 bp, synthetic construct
  source 1..15: mol_type = other DNA
tcctgtagtcttgca

SEQ ID NO: 10001 - DNA, 15 bp, synthetic construct
  source 1..15: mol_type = other DNA
attccgggaattatc

SEQ ID NO: 10002 - DNA, 15 bp, synthetic construct
  source 1..15: mol_type = other DNA
gactgggtcaactgt

SEQ ID NO: 10003 - DNA, 15 bp, synthetic construct
  source 1..15: mol_type = other DNA
tcctcttgccaatga

SEQ ID NO: 10004 - DNA, 15 bp, synthetic construct
  source 1..15: mol_type = other DNA
actcaagactaggca

SEQ ID NO: 10005 - DNA, 15 bp, synthetic construct
  source 1..15: mol_type = other DNA
tccttgaaagtactt

SEQ ID NO: 10006 - DNA, 15 bp, synthetic construct
  source 1..15: mol_type = other DNA
ctctatgattccttg

SEQ ID NO: 10007 - DNA, 15 bp, synthetic construct
  source 1..15: mol_type = other DNA
aagagcatatgatgg

SEQ ID NO: 10008 - DNA, 15 bp, synthetic construct
  source 1..15: mol_type = other DNA
aatcagcgcaactgg

SEQ ID NO: 10009 - DNA, 15 bp, synthetic construct
  source 1..15: mol_type = other DNA
gcagtggttcgagat

SEQ ID NO: 10010 - DNA, 15 bp, synthetic construct
  source 1..15: mol_type = other DNA
actgaagaggtattt

SEQ ID NO: 10011 - DNA, 15 bp, synthetic construct
  source 1..15: mol_type = other DNA
ctcatctgataatgt

SEQ ID NO: 10012 - DNA, 15 bp, synthetic construct
  source 1..15: mol_type = other DNA
tgacacgggtaagtt

SEQ ID NO: 10013 - DNA, 15 bp, synthetic construct
  source 1..15: mol_type = other DNA
gctgtggcgcttgga

SEQ ID NO: 10014 - DNA, 15 bp, synthetic construct
  source 1..15: mol_type = other DNA
atggctagtaagacc

SEQ ID NO: 10015 - DNA, 15 bp, synthetic construct
  source 1..15: mol_type = other DNA
agagatagagatcat

SEQ ID NO: 10016 - DNA, 15 bp, synthetic construct
  source 1..15: mol_type = other DNA
gcagagttgcagact

SEQ ID NO: 10017 - DNA, 15 bp, synthetic construct
  source 1..15: mol_type = other DNA
aagatggccattatc

SEQ ID NO: 10018 - DNA, 15 bp, synthetic construct
  source 1..15: mol_type = other DNA
tcaagccagacttat

SEQ ID NO: 10019 - DNA, 15 bp, synthetic construct
  source 1..15: mol_type = other DNA
ggagaattgcttttt

SEQ ID NO: 10020 - DNA, 15 bp, synthetic construct
  source 1..15: mol_type = other DNA
ggctctgtttggccg

SEQ ID NO: 10021 - DNA, 15 bp, synthetic construct
  source 1..15: mol_type = other DNA
aatgggcttttattc

SEQ ID NO: 10022 - DNA, 15 bp, synthetic construct
  source 1..15: mol_type = other DNA
gtaccttcccgacat

SEQ ID NO: 10023 - DNA, 15 bp, synthetic construct
  source 1..15: mol_type = other DNA
tggtgttcaaatatg

SEQ ID NO: 10024 - DNA, 15 bp, synthetic construct
  source 1..15: mol_type = other DNA
tctcataccagaggc

SEQ ID NO: 10025 - DNA, 15 bp, synthetic construct
  source 1..15: mol_type = other DNA
ttagaggataccaga

SEQ ID NO: 10026 - DNA, 15 bp, synthetic construct
  source 1..15: mol_type = other DNA
cacttgagcctctag

SEQ ID NO: 10027 - DNA, 15 bp, synthetic construct
  source 1..15: mol_type = other DNA
caccaacacaggtgt

SEQ ID NO: 10028 - DNA, 15 bp, synthetic construct
  source 1..15: mol_type = other DNA
ccagtgtatgacttg

SEQ ID NO: 10029 - DNA, 15 bp, synthetic construct
  source 1..15: mol_type = other DNA
ggcagatcctcgatg

SEQ ID NO: 10030 - DNA, 15 bp, synthetic construct
  source 1..15: mol_type = other DNA
tgtcatgaggactgg

SEQ ID NO: 10031 - DNA, 15 bp, synthetic construct
  source 1..15: mol_type = other DNA
tgcaaaaaatgggag

SEQ ID NO: 10032 - DNA, 15 bp, synthetic construct
  source 1..15: mol_type = other DNA
actttgcagttgaga

SEQ ID NO: 10033 - DNA, 15 bp, synthetic construct
  source 1..15: mol_type = other DNA
ccgccttccaaacct

SEQ ID NO: 10034 - DNA, 15 bp, synthetic construct
  source 1..15: mol_type = other DNA
aatggatatatggga

SEQ ID NO: 10035 - DNA, 15 bp, synthetic construct
  source 1..15: mol_type = other DNA
gaggcagaaagtgaa

SEQ ID NO: 10036 - DNA, 15 bp, synthetic construct
  source 1..15: mol_type = other DNA
cctgggcaaaaacaa

SEQ ID NO: 10037 - DNA, 15 bp, synthetic construct
  source 1..15: mol_type = other DNA
aggcaaagttccact

SEQ ID NO: 10038 - DNA, 15 bp, synthetic construct
  source 1..15: mol_type = other DNA
taggtgatgggacca

SEQ ID NO: 10039 - DNA, 15 bp, synthetic construct
  source 1..15: mol_type = other DNA
gtgagactcagctga

SEQ ID NO: 10040 - DNA, 15 bp, synthetic construct
  source 1..15: mol_type = other DNA
gctcttcatggagga

SEQ ID NO: 10041 - DNA, 15 bp, synthetic construct
  source 1..15: mol_type = other DNA
ctttcctcagaaaat

SEQ ID NO: 10042 - DNA, 15 bp, synthetic construct
  source 1..15: mol_type = other DNA
tgatcctagcttgac

SEQ ID NO: 10043 - DNA, 15 bp, synthetic construct
  source 1..15: mol_type = other DNA
ggccacaatcgcctt

SEQ ID NO: 10044 - DNA, 15 bp, synthetic construct
  source 1..15: mol_type = other DNA
aggttcttcccattt

SEQ ID NO: 10045 - DNA, 15 bp, synthetic construct
  source 1..15: mol_type = other DNA
gtgaccagttcactc

SEQ ID NO: 10046 - DNA, 15 bp, synthetic construct
  source 1..15: mol_type = other DNA
ctgtgaaaagcagaa

SEQ ID NO: 10047 - DNA, 15 bp, synthetic construct
  source 1..15: mol_type = other DNA
agtaatactctccct

SEQ ID NO: 10048 - DNA, 15 bp, synthetic construct
  source 1..15: mol_type = other DNA
ctgcccacaagtcac

SEQ ID NO: 10049 - DNA, 15 bp, synthetic construct
  source 1..15: mol_type = other DNA
ttcagtctttcacct

SEQ ID NO: 10050 - DNA, 15 bp, synthetic construct
  source 1..15: mol_type = other DNA
accactgcaataagt

SEQ ID NO: 10051 - DNA, 15 bp, synthetic construct
  source 1..15: mol_type = other DNA
atccttatagaacag

SEQ ID NO: 10052 - DNA, 15 bp, synthetic construct
  source 1..15: mol_type = other DNA
ttttcttgaccctca

SEQ ID NO: 10053 - DNA, 15 bp, synthetic construct
  source 1..15: mol_type = other DNA
tggtactctgcagtg

SEQ ID NO: 10054 - DNA, 15 bp, synthetic construct
  source 1..15: mol_type = other DNA
ctggactgtgttgct

SEQ ID NO: 10055 - DNA, 15 bp, synthetic construct
  source 1..15: mol_type = other DNA
cgttgttggagttca

SEQ ID NO: 10056 - DNA, 15 bp, synthetic construct
  source 1..15: mol_type = other DNA
acgcagatccgaaac

SEQ ID NO: 10057 - DNA, 15 bp, synthetic construct
  source 1..15: mol_type = other DNA
gagtgaagactgcag

SEQ ID NO: 10058 - DNA, 15 bp, synthetic construct
  source 1..15: mol_type = other DNA
catggccatgactga

SEQ ID NO: 10059 - DNA, 15 bp, synthetic construct
  source 1..15: mol_type = other DNA
tttatatgtccctga

SEQ ID NO: 10060 - DNA, 15 bp, synthetic construct
  source 1..15: mol_type = other DNA
ggaatggcaattatc

SEQ ID NO: 10061 - DNA, 15 bp, synthetic construct
  source 1..15: mol_type = other DNA
ctcctcaaactgggt

SEQ ID NO: 10062 - DNA, 15 bp, synthetic construct
  source 1..15: mol_type = other DNA
ctcctggtaaacgtc

SEQ ID NO: 10063 - DNA, 15 bp, synthetic construct
  source 1..15: mol_type = other DNA
agacgcagagtactc

SEQ ID NO: 10064 - DNA, 15 bp, synthetic construct
  source 1..15: mol_type = other DNA
gtcctgcatagatca

SEQ ID NO: 10065 - DNA, 15 bp, synthetic construct
  source 1..15: mol_type = other DNA
cccacaggtaaggac

SEQ ID NO: 10066 - DNA, 15 bp, synthetic construct
  source 1..15: mol_type = other DNA
gggatctgccacatg

SEQ ID NO: 10067 - DNA, 15 bp, synthetic construct
  source 1..15: mol_type = other DNA
tcagtggtggaatca

SEQ ID NO: 10068 - DNA, 15 bp, synthetic construct
  source 1..15: mol_type = other DNA
tccagtgctctcaca

SEQ ID NO: 10069 - DNA, 15 bp, synthetic construct
  source 1..15: mol_type = other DNA
ggatctccatcctag

SEQ ID NO: 10070 - DNA, 15 bp, synthetic construct
  source 1..15: mol_type = other DNA
aagttgatagaaacg

SEQ ID NO: 10071 - DNA, 15 bp, synthetic construct
  source 1..15: mol_type = other DNA
atcctgtcgtcaggg

SEQ ID NO: 10072 - DNA, 15 bp, synthetic construct
  source 1..15: mol_type = other DNA
gcctcaaaccaattg

SEQ ID NO: 10073 - DNA, 15 bp, synthetic construct
  source 1..15: mol_type = other DNA
ctaaggcgacatgct

SEQ ID NO: 10074 - DNA, 15 bp, synthetic construct
  source 1..15: mol_type = other DNA
ttagatcaggtgcaa

SEQ ID NO: 10075 - DNA, 15 bp, synthetic construct
  source 1..15: mol_type = other DNA
ccattgccctcttaa

SEQ ID NO: 10076 - DNA, 15 bp, synthetic construct
  source 1..15: mol_type = other DNA
agggcgccaacagag

SEQ ID NO: 10077 - DNA, 15 bp, synthetic construct
  source 1..15: mol_type = other DNA
tacaacaaggcttac

SEQ ID NO: 10078 - DNA, 15 bp, synthetic construct
  source 1..15: mol_type = other DNA
tagtgacacgcggct

SEQ ID NO: 10079 - DNA, 15 bp, synthetic construct
  source 1..15: mol_type = other DNA
acttgactactgaaa

SEQ ID NO: 10080 - DNA, 15 bp, synthetic construct
  source 1..15: mol_type = other DNA
ggaatatgcgccctc

SEQ ID NO: 10081 - DNA, 15 bp, synthetic construct
  source 1..15: mol_type = other DNA
ggtaatgactcgaag

SEQ ID NO: 10082 - DNA, 15 bp, synthetic construct
  source 1..15: mol_type = other DNA
ctccaagagagttct

SEQ ID NO: 10083 - DNA, 15 bp, synthetic construct
  source 1..15: mol_type = other DNA
tagtcggacctctcg

SEQ ID NO: 10084 - DNA, 15 bp, synthetic construct
  source 1..15: mol_type = other DNA
cttggctttcatttg

SEQ ID NO: 10085 - DNA, 15 bp, synthetic construct
  source 1..15: mol_type = other DNA
gagaagattgtggtt

SEQ ID NO: 10086 - DNA, 15 bp, synthetic construct
  source 1..15: mol_type = other DNA
ttgccatcttgtgtc

SEQ ID NO: 10087 - DNA, 15 bp, synthetic construct
  source 1..15: mol_type = other DNA
cgtgatgaagtcgaa

SEQ ID NO: 10088 - DNA, 15 bp, synthetic construct
  source 1..15: mol_type = other DNA
gaagaaaacctggcc

SEQ ID NO: 10089 - DNA, 15 bp, synthetic construct
  source 1..15: mol_type = other DNA
ctccacacaccatat

SEQ ID NO: 10090 - DNA, 15 bp, synthetic construct
  source 1..15: mol_type = other DNA
agagaaaaataggga

SEQ ID NO: 10091 - DNA, 15 bp, synthetic construct
  source 1..15: mol_type = other DNA
caagttgtcggagac

SEQ ID NO: 10092 - DNA, 15 bp, synthetic construct
  source 1..15: mol_type = other DNA
ctcatgatgaaggaa

SEQ ID NO: 10093 - DNA, 15 bp, synthetic construct
  source 1..15: mol_type = other DNA
aggaagaccagttca

SEQ ID NO: 10094 - DNA, 15 bp, synthetic construct
  source 1..15: mol_type = other DNA
tggctcagcgtttgg

SEQ ID NO: 10095 - DNA, 15 bp, synthetic construct
  source 1..15: mol_type = other DNA
caggtgggcaagcga

SEQ ID NO: 10096 - DNA, 15 bp, synthetic construct
  source 1..15: mol_type = other DNA
agcctaatgacgccg

SEQ ID NO: 10097 - DNA, 15 bp, synthetic construct
  source 1..15: mol_type = other DNA
gaaggcacaccatcc

SEQ ID NO: 10098 - DNA, 15 bp, synthetic construct
  source 1..15: mol_type = other DNA
tcggaaatccggtcc

SEQ ID NO: 10099 - DNA, 15 bp, synthetic construct
  source 1..15: mol_type = other DNA
caggatcaggacgaa

SEQ ID NO: 10100 - DNA, 15 bp, synthetic construct
  source 1..15: mol_type = other DNA
cgccgcgattgaggt

SEQ ID NO: 10101 - DNA, 15 bp, synthetic construct
  source 1..15: mol_type = other DNA
tgccaactgtacaca

SEQ ID NO: 10102 - DNA, 15 bp, synthetic construct
  source 1..15: mol_type = other DNA
ttttttgtgtgtgtg

SEQ ID NO: 10103 - DNA, 15 bp, synthetic construct
  source 1..15: mol_type = other DNA
cggaagaggtgacag

SEQ ID NO: 10104 - DNA, 15 bp, synthetic construct
  source 1..15: mol_type = other DNA
gatatttcagagtcc

SEQ ID NO: 10105 - DNA, 15 bp, synthetic construct
  source 1..15: mol_type = other DNA
gacctccaggttaga

SEQ ID NO: 10106 - DNA, 15 bp, synthetic construct
  source 1..15: mol_type = other DNA
ggccaagcaccatct

SEQ ID NO: 10107 - DNA, 15 bp, synthetic construct
  source 1..15: mol_type = other DNA
aaagaaaactagggc

SEQ ID NO: 10108 - DNA, 15 bp, synthetic construct
  source 1..15: mol_type = other DNA
cactgtcctgcttgg

SEQ ID NO: 10109 - DNA, 15 bp, synthetic construct
  source 1..15: mol_type = other DNA
ggatttcttcgaagg

SEQ ID NO: 10110 - DNA, 15 bp, synthetic construct
  source 1..15: mol_type = other DNA
tatgagaagaagaga

SEQ ID NO: 10111 - DNA, 15 bp, synthetic construct
  source 1..15: mol_type = other DNA
cgcccttctcatagg

SEQ ID NO: 10112 - DNA, 15 bp, synthetic construct
  source 1..15: mol_type = other DNA
ccaccacgttgtcag

SEQ ID NO: 10113 - DNA, 15 bp, synthetic construct
  source 1..15: mol_type = other DNA
ccttaaaaactggct

SEQ ID NO: 10114 - DNA, 15 bp, synthetic construct
  source 1..15: mol_type = other DNA
aaaaccttctgtctg

SEQ ID NO: 10115 - DNA, 15 bp, synthetic construct
  source 1..15: mol_type = other DNA
tgttcataaacaagc

SEQ ID NO: 10116 - DNA, 15 bp, synthetic construct
  source 1..15: mol_type = other DNA
ctagatcacagagga

SEQ ID NO: 10117 - DNA, 15 bp, synthetic construct
  source 1..15: mol_type = other DNA
tgtggccatcaaaaa

SEQ ID NO: 10118 - DNA, 15 bp, synthetic construct
  source 1..15: mol_type = other DNA
gagcctagatcatca

SEQ ID NO: 10119 - DNA, 15 bp, synthetic construct
  source 1..15: mol_type = other DNA
gggccatggtctgca

SEQ ID NO: 10120 - DNA, 15 bp, synthetic construct
  source 1..15: mol_type = other DNA
tcgtggcaaatattt

SEQ ID NO: 10121 - DNA, 15 bp, synthetic construct
  source 1..15: mol_type = other DNA
tgggttgtcgatgtc

SEQ ID NO: 10122 - DNA, 15 bp, synthetic construct
  source 1..15: mol_type = other DNA
taatgatgcaaatgg

SEQ ID NO: 10123 - DNA, 15 bp, synthetic construct
  source 1..15: mol_type = other DNA
tgctcgcgatgggaa

SEQ ID NO: 10124 - DNA, 15 bp, synthetic construct
  source 1..15: mol_type = other DNA
ggaccactttgaaag

SEQ ID NO: 10125 - DNA, 15 bp, synthetic construct
  source 1..15: mol_type = other DNA
ggttctgtttatttg

SEQ ID NO: 10126 - DNA, 15 bp, synthetic construct
  source 1..15: mol_type = other DNA
tgcgcagctggctgt

SEQ ID NO: 10127 - DNA, 15 bp, synthetic construct
  source 1..15: mol_type = other DNA
gccagctcgagtgtt

SEQ ID NO: 10128 - DNA, 15 bp, synthetic construct
  source 1..15: mol_type = other DNA
ccagcatcaaaagag

SEQ ID NO: 10129 - DNA, 15 bp, synthetic construct
  source 1..15: mol_type = other DNA
gcatgcgtaacaccc

SEQ ID NO: 10130 - DNA, 15 bp, synthetic construct
  source 1..15: mol_type = other DNA
cggtcaaatatcttt

SEQ ID NO: 10131 - DNA, 15 bp, synthetic construct
  source 1..15: mol_type = other DNA
aggcctttgttgact

SEQ ID NO: 10132 - DNA, 15 bp, synthetic construct
  source 1..15: mol_type = other DNA
catctgattgttccc

SEQ ID NO: 10133 - DNA, 15 bp, synthetic construct
  source 1..15: mol_type = other DNA
agcggcgggtactca

SEQ ID NO: 10134 - DNA, 15 bp, synthetic construct
  source 1..15: mol_type = other DNA
cacaagagatggcac

SEQ ID NO: 10135 - DNA, 15 bp, synthetic construct
  source 1..15: mol_type = other DNA
ggatagccacagtgc

SEQ ID NO: 10136 - DNA, 15 bp, synthetic construct
  source 1..15: mol_type = other DNA
ggaggtctgttgagt

SEQ ID NO: 10137 - DNA, 15 bp, synthetic construct
  source 1..15: mol_type = other DNA
tgttagatgagtccg

SEQ ID NO: 10138 - DNA, 15 bp, synthetic construct
  source 1..15: mol_type = other DNA
ctttgactgctcggc

SEQ ID NO: 10139 - DNA, 15 bp, synthetic construct
  source 1..15: mol_type = other DNA
catttgtccttcagc

SEQ ID NO: 10140 - DNA, 15 bp, synthetic construct
  source 1..15: mol_type = other DNA
ggtgtttcctgtgag

SEQ ID NO: 10141 - DNA, 15 bp, synthetic construct
  source 1..15: mol_type = other DNA
tggactcaatctccc

SEQ ID NO: 10142 - DNA, 15 bp, synthetic construct
  source 1..15: mol_type = other DNA
agattcaagcgaaag

SEQ ID NO: 10143 - DNA, 15 bp, synthetic construct
  source 1..15: mol_type = other DNA
ccagcatagtggaag

SEQ ID NO: 10144 - DNA, 15 bp, synthetic construct
  source 1..15: mol_type = other DNA
cccttaccggaaatt

SEQ ID NO: 10145 - DNA, 15 bp, synthetic construct
  source 1..15: mol_type = other DNA
cctttagctccggac

SEQ ID NO: 10146 - DNA, 15 bp, synthetic construct
  source 1..15: mol_type = other DNA
gtcctggtaagtctt

SEQ ID NO: 10147 - DNA, 15 bp, synthetic construct
  source 1..15: mol_type = other DNA
tcaccattgtctcgg

SEQ ID NO: 10148 - DNA, 15 bp, synthetic construct
  source 1..15: mol_type = other DNA
ccaccctcgcatatg

SEQ ID NO: 10149 - DNA, 15 bp, synthetic construct
  source 1..15: mol_type = other DNA
ggttgatggagttcc

SEQ ID NO: 10150 - DNA, 15 bp, synthetic construct
  source 1..15: mol_type = other DNA
gctgattgttgatct

SEQ ID NO: 10151 - DNA, 15 bp, synthetic construct
  source 1..15: mol_type = other DNA
accgggttcctgaac

SEQ ID NO: 10152 - DNA, 15 bp, synthetic construct
  source 1..15: mol_type = other DNA
ccgtcaaagtctgca

SEQ ID NO: 10153 - DNA, 15 bp, synthetic construct
  source 1..15: mol_type = other DNA
tgtgtgcgttgctca

SEQ ID NO: 10154 - DNA, 15 bp, synthetic construct
  source 1..15: mol_type = other DNA
catcgctgttcatga

SEQ ID NO: 10155 - DNA, 15 bp, synthetic construct
  source 1..15: mol_type = other DNA
tgggttgatgtggaa

SEQ ID NO: 10156 - DNA, 15 bp, synthetic construct
  source 1..15: mol_type = other DNA
gcgcaggaagacatc

SEQ ID NO: 10157 - DNA, 15 bp, synthetic construct
  source 1..15: mol_type = other DNA
gtcttcaccaggaag

SEQ ID NO: 10158 - DNA, 15 bp, synthetic construct
  source 1..15: mol_type = other DNA
catacagctctaggc

SEQ ID NO: 10159 - DNA, 15 bp, synthetic construct
  source 1..15: mol_type = other DNA
ttgaagccaaatgga

SEQ ID NO: 10160 - DNA, 15 bp, synthetic construct
  source 1..15: mol_type = other DNA
tgcccttcaaccgct

SEQ ID NO: 10161 - DNA, 15 bp, synthetic construct
  source 1..15: mol_type = other DNA
cctcagtcgtctctg

SEQ ID NO: 10162 - DNA, 15 bp, synthetic construct
  source 1..15: mol_type = other DNA
gtgatgtcatgaccc

SEQ ID NO: 10163 - DNA, 15 bp, synthetic construct
  source 1..15: mol_type = other DNA
cccatcccacgtcga

SEQ ID NO: 10164 - DNA, 15 bp, synthetic construct
  source 1..15: mol_type = other DNA
gtcaccttcctcaac

SEQ ID NO: 10165 - DNA, 15 bp, synthetic construct
  source 1..15: mol_type = other DNA
acaggaggctaactc

SEQ ID NO: 10166 - DNA, 15 bp, synthetic construct
  source 1..15: mol_type = other DNA
tttctaggacacctc

SEQ ID NO: 10167 - DNA, 15 bp, synthetic construct
  source 1..15: mol_type = other DNA
gaggtaccaatttgt

SEQ ID NO: 10168 - DNA, 15 bp, synthetic construct
  source 1..15: mol_type = other DNA
cctccgatggtttcc

SEQ ID NO: 10169 - DNA, 15 bp, synthetic construct
  source 1..15: mol_type = other DNA
tttcttctgtttctc

SEQ ID NO: 10170 - DNA, 15 bp, synthetic construct
  source 1..15: mol_type = other DNA
ctcaaagactgctcc

SEQ ID NO: 10171 - DNA, 15 bp, synthetic construct
  source 1..15: mol_type = other DNA
gttttgataataggc

SEQ ID NO: 10172 - DNA, 15 bp, synthetic construct
  source 1..15: mol_type = other DNA
gtgcaaagtaagtga

SEQ ID NO: 10173 - DNA, 15 bp, synthetic construct
  source 1..15: mol_type = other DNA
gtgccagcaaagtgt

SEQ ID NO: 10174 - DNA, 15 bp, synthetic construct
  source 1..15: mol_type = other DNA
cctccctcagttttg

SEQ ID NO: 10175 - DNA, 15 bp, synthetic construct
  source 1..15: mol_type = other DNA
cattccttccattct

SEQ ID NO: 10176 - DNA, 15 bp, synthetic construct
  source 1..15: mol_type = other DNA
ttcagttcctgaagt

SEQ ID NO: 10177 - DNA, 15 bp, synthetic construct
  source 1..15: mol_type = other DNA
cacgttgctctccaa

SEQ ID NO: 10178 - DNA, 15 bp, synthetic construct
  source 1..15: mol_type = other DNA
aaataatgtccagtc

SEQ ID NO: 10179 - DNA, 15 bp, synthetic construct
  source 1..15: mol_type = other DNA
atccttttccaatga

SEQ ID NO: 10180 - DNA, 15 bp, synthetic construct
  source 1..15: mol_type = other DNA
ccaccttcaatgaat

SEQ ID NO: 10181 - DNA, 15 bp, synthetic construct
  source 1..15: mol_type = other DNA
gtctcttccaagggc

SEQ ID NO: 10182 - DNA, 15 bp, synthetic construct
  source 1..15: mol_type = other DNA
ccagcagttgatcat

SEQ ID NO: 10183 - DNA, 15 bp, synthetic construct
  source 1..15: mol_type = other DNA
atagacagtcacggg

SEQ ID NO: 10184 - DNA, 15 bp, synthetic construct
  source 1..15: mol_type = other DNA
ctccatggatcactt

SEQ ID NO: 10185 - DNA, 15 bp, synthetic construct
  source 1..15: mol_type = other DNA
tggtgcccaaaatct

SEQ ID NO: 10186 - DNA, 15 bp, synthetic construct
  source 1..15: mol_type = other DNA
tgatctcgcggaata

SEQ ID NO: 10187 - DNA, 15 bp, synthetic construct
  source 1..15: mol_type = other DNA
aaaaagggaatcatc

SEQ ID NO: 10188 - DNA, 15 bp, synthetic construct
  source 1..15: mol_type = other DNA
aacttttttgttggc

SEQ ID NO: 10189 - DNA, 15 bp, synthetic construct
  source 1..15: mol_type = other DNA
gagttgtagacaggt

SEQ ID NO: 10190 - DNA, 15 bp, synthetic construct
  source 1..15: mol_type = other DNA
cgttgccatacagct

SEQ ID NO: 10191 - DNA, 15 bp, synthetic construct
  source 1..15: mol_type = other DNA
gatgttggtctcgat

SEQ ID NO: 10192 - DNA, 15 bp, synthetic construct
  source 1..15: mol_type = other DNA
gcaccagcaggcgtt

SEQ ID NO: 10193 - DNA, 15 bp, synthetic construct
  source 1..15: mol_type = other DNA
ctccatgaaaccggt

SEQ ID NO: 10194 - DNA, 15 bp, synthetic construct
  source 1..15: mol_type = other DNA
tgctttggagttatt

SEQ ID NO: 10195 - DNA, 15 bp, synthetic construct
  source 1..15: mol_type = other DNA
ggcgtgctcactgag

SEQ ID NO: 10196 - DNA, 15 bp, synthetic construct
  source 1..15: mol_type = other DNA
aagactattgccaca

SEQ ID NO: 10197 - DNA, 15 bp, synthetic construct
  source 1..15: mol_type = other DNA
catttggtttccgga

SEQ ID NO: 10198 - DNA, 15 bp, synthetic construct
  source 1..15: mol_type = other DNA
tgagagtgctgcgag

SEQ ID NO: 10199 - DNA, 15 bp, synthetic construct
  source 1..15: mol_type = other DNA
gtatatagaaggcat

SEQ ID NO: 10200 - DNA, 15 bp, synthetic construct
  source 1..15: mol_type = other DNA
tgtacagagaaaaca

SEQ ID NO: 10201 - DNA, 15 bp, synthetic construct
  source 1..15: mol_type = other DNA
tgcctgttgaaatct

SEQ ID NO: 10202 - DNA, 15 bp, synthetic construct
  source 1..15: mol_type = other DNA
ccatggacaactgct

SEQ ID NO: 10203 - DNA, 15 bp, synthetic construct
  source 1..15: mol_type = other DNA
tgtgtgcatggactc

SEQ ID NO: 10204 - DNA, 15 bp, synthetic construct
  source 1..15: mol_type = other DNA
ctctacaaactggcc

SEQ ID NO: 10205 - DNA, 15 bp, synthetic construct
  source 1..15: mol_type = other DNA
gagatagcaggaact

SEQ ID NO: 10206 - DNA, 15 bp, synthetic construct
  source 1..15: mol_type = other DNA
gcagttgattcgctt

SEQ ID NO: 10207 - DNA, 15 bp, synthetic construct
  source 1..15: mol_type = other DNA
cccaaagaagtcaac

SEQ ID NO: 10208 - DNA, 15 bp, synthetic construct
  source 1..15: mol_type = other DNA
ggagtaggagaaact

SEQ ID NO: 10209 - DNA, 15 bp, synthetic construct
  source 1..15: mol_type = other DNA
gcttaatgcgcctct

SEQ ID NO: 10210 - DNA, 15 bp, synthetic construct
  source 1..15: mol_type = other DNA
gttgagggcctcaaa

SEQ ID NO: 10211 - DNA, 15 bp, synthetic construct
  source 1..15: mol_type = other DNA
ggaactctggaaggt

SEQ ID NO: 10212 - DNA, 15 bp, synthetic construct
  source 1..15: mol_type = other DNA
tcaagagcattagga

SEQ ID NO: 10213 - DNA, 15 bp, synthetic construct
  source 1..15: mol_type = other DNA
tctgatcggtggtgc

SEQ ID NO: 10214 - DNA, 15 bp, synthetic construct
  source 1..15: mol_type = other DNA
gcgggaaggacttta

SEQ ID NO: 10215 - DNA, 15 bp, synthetic construct
  source 1..15: mol_type = other DNA
aagtgtatatagtgc

SEQ ID NO: 10216 - DNA, 15 bp, synthetic construct
  source 1..15: mol_type = other DNA
ccagcattgtgtaaa

SEQ ID NO: 10217 - DNA, 15 bp, synthetic construct
  source 1..15: mol_type = other DNA
aagcttcaatctgat

SEQ ID NO: 10218 - DNA, 15 bp, synthetic construct
  source 1..15: mol_type = other DNA
ggctgactctcgttt

SEQ ID NO: 10219 - DNA, 15 bp, synthetic construct
  source 1..15: mol_type = other DNA
ttgtttatccagccc

SEQ ID NO: 10220 - DNA, 15 bp, synthetic construct
  source 1..15: mol_type = other DNA
ttcgcaggctcttta

SEQ ID NO: 10221 - DNA, 15 bp, synthetic construct
  source 1..15: mol_type = other DNA
caacattctgtcagc

SEQ ID NO: 10222 - DNA, 15 bp, synthetic construct
  source 1..15: mol_type = other DNA
ctcaaacttgggctc

SEQ ID NO: 10223 - DNA, 15 bp, synthetic construct
  source 1..15: mol_type = other DNA
ttcaattgccatgag

SEQ ID NO: 10224 - DNA, 15 bp, synthetic construct
  source 1..15: mol_type = other DNA
ttgaggagagttact

SEQ ID NO: 10225 - DNA, 15 bp, synthetic construct
  source 1..15: mol_type = other DNA
tcgttctacacccac

SEQ ID NO: 10226 - DNA, 15 bp, synthetic construct
  source 1..15: mol_type = other DNA
atccagaagctttat

SEQ ID NO: 10227 - DNA, 15 bp, synthetic construct
  source 1..15: mol_type = other DNA
ctgtcaagatcgccc

SEQ ID NO: 10228 - DNA, 15 bp, synthetic construct
  source 1..15: mol_type = other DNA
aactgacctgggaat

SEQ ID NO: 10229 - DNA, 15 bp, synthetic construct
  source 1..15: mol_type = other DNA
aatgtggagtagaaa

SEQ ID NO: 10230 - DNA, 15 bp, synthetic construct
  source 1..15: mol_type = other DNA
ctgggtttgcattca

SEQ ID NO: 10231 - DNA, 15 bp, synthetic construct
  source 1..15: mol_type = other DNA
actctggattcagct

SEQ ID NO: 10232 - DNA, 15 bp, synthetic construct
  source 1..15: mol_type = other DNA
acttgtaatctgcaa

SEQ ID NO: 10233 - DNA, 15 bp, synthetic construct
  source 1..15: mol_type = other DNA
gtggatccgacagtt

SEQ ID NO: 10234 - DNA, 15 bp, synthetic construct
  source 1..15: mol_type = other DNA
ccactgaccttatat

SEQ ID NO: 10235 - DNA, 15 bp, synthetic construct
  source 1..15: mol_type = other DNA
ctttctgggtcaata

SEQ ID NO: 10236 - DNA, 15 bp, synthetic construct
  source 1..15: mol_type = other DNA
tcatgaggcttattg

SEQ ID NO: 10237 - DNA, 15 bp, synthetic construct
  source 1..15: mol_type = other DNA
tcaatgaatgcaaac

SEQ ID NO: 10238 - DNA, 15 bp, synthetic construct
  source 1..15: mol_type = other DNA
gatttcacctattag

SEQ ID NO: 10239 - DNA, 15 bp, synthetic construct
  source 1..15: mol_type = other DNA
agatgttcatcccgt

SEQ ID NO: 10240 - DNA, 15 bp, synthetic construct
  source 1..15: mol_type = other DNA
ttcttcagcgggtag

SEQ ID NO: 10241 - DNA, 15 bp, synthetic construct
  source 1..15: mol_type = other DNA
tgagcctatctacct

SEQ ID NO: 10242 - DNA, 15 bp, synthetic construct
  source 1..15: mol_type = other DNA
gcgagctgagtaaag

SEQ ID NO: 10243 - DNA, 15 bp, synthetic construct
  source 1..15: mol_type = other DNA
cgctcaggccattac

SEQ ID NO: 10244 - DNA, 15 bp, synthetic construct
  source 1..15: mol_type = other DNA
gggtggtcgttcaca

SEQ ID NO: 10245 - DNA, 15 bp, synthetic construct
  source 1..15: mol_type = other DNA
ttccgtgccgtagga

SEQ ID NO: 10246 - DNA, 15 bp, synthetic construct
  source 1..15: mol_type = other DNA
cagaccctcggcact

SEQ ID NO: 10247 - DNA, 15 bp, synthetic construct
  source 1..15: mol_type = other DNA
gaacaatccctggct

SEQ ID NO: 10248 - DNA, 15 bp, synthetic construct
  source 1..15: mol_type = other DNA
gtcccgacaatacca

SEQ ID NO: 10249 - DNA, 15 bp, synthetic construct
  source 1..15: mol_type = other DNA
cacagagtcatatcc

SEQ ID NO: 10250 - DNA, 15 bp, synthetic construct
  source 1..15: mol_type = other DNA
gtgtgctggattcac

SEQ ID NO: 10251 - DNA, 15 bp, synthetic construct
  source 1..15: mol_type = other DNA
cttctaacgtcaccc

SEQ ID NO: 10252 - DNA, 15 bp, synthetic construct
  source 1..15: mol_type = other DNA
tgagattgctggtgc

SEQ ID NO: 10253 - DNA, 15 bp, synthetic construct
  source 1..15: mol_type = other DNA
tttcctgttggcgtt

SEQ ID NO: 10254 - DNA, 15 bp, synthetic construct
  source 1..15: mol_type = other DNA
aggtcgtacccacac

SEQ ID NO: 10255 - DNA, 15 bp, synthetic construct
  source 1..15: mol_type = other DNA
gcaaaacaactttca

SEQ ID NO: 10256 - DNA, 15 bp, synthetic construct
  source 1..15: mol_type = other DNA
cgttcatctctaccc

SEQ ID NO: 10257 - DNA, 15 bp, synthetic construct
  source 1..15: mol_type = other DNA
cgggataagggtagt

SEQ ID NO: 10258 - DNA, 15 bp, synthetic construct
  source 1..15: mol_type = other DNA
tctcccgtgtgtacc

SEQ ID NO: 10259 - DNA, 15 bp, synthetic construct
  source 1..15: mol_type = other DNA
ccagcaatcttccaa

SEQ ID NO: 10260 - DNA, 15 bp, synthetic construct
  source 1..15: mol_type = other DNA
aactgttgttgaaca

SEQ ID NO: 10261 - DNA, 15 bp, synthetic construct
  source 1..15: mol_type = other DNA
gccaccaaagaagag

SEQ ID NO: 10262 - DNA, 15 bp, synthetic construct
  source 1..15: mol_type = other DNA
tgtcccacacggtgc

SEQ ID NO: 10263 - DNA, 15 bp, synthetic construct
  source 1..15: mol_type = other DNA
agttggagataagcc

SEQ ID NO: 10264 - DNA, 15 bp, synthetic construct
  source 1..15: mol_type = other DNA
agggtgaatcgggat

SEQ ID NO: 10265 - DNA, 15 bp, synthetic construct
  source 1..15: mol_type = other DNA
ttggtctaatgggaa

SEQ ID NO: 10266 - DNA, 15 bp, synthetic construct
  source 1..15: mol_type = other DNA
gggaaccagacttgg

SEQ ID NO: 10267 - DNA, 15 bp, synthetic construct
  source 1..15: mol_type = other DNA
ccactgtgagaaccc

SEQ ID NO: 10268 - DNA, 15 bp, synthetic construct
  source 1..15: mol_type = other DNA
cctccctgaaaaaca

SEQ ID NO: 10269 - DNA, 15 bp, synthetic construct
  source 1..15: mol_type = other DNA
actccaccgtgtcag

SEQ ID NO: 10270 - DNA, 15 bp, synthetic construct
  source 1..15: mol_type = other DNA
cctatgttgacctgg

SEQ ID NO: 10271 - DNA, 15 bp, synthetic construct
  source 1..15: mol_type = other DNA
gagccctgtccgtca

SEQ ID NO: 10272 - DNA, 15 bp, synthetic construct
  source 1..15: mol_type = other DNA
ctggaatcccgtata

SEQ ID NO: 10273 - DNA, 15 bp, synthetic construct
  source 1..15: mol_type = other DNA
aggcacgaacttgtg

SEQ ID NO: 10274 - DNA, 15 bp, synthetic construct
  source 1..15: mol_type = other DNA
cgagtttacccaggc

SEQ ID NO: 10275 - DNA, 15 bp, synthetic construct
  source 1..15: mol_type = other DNA
ctttccaagctcact

SEQ ID NO: 10276 - DNA, 15 bp, synthetic construct
  source 1..15: mol_type = other DNA
ccatttgtctcaggg

SEQ ID NO: 10277 - DNA, 15 bp, synthetic construct
  source 1..15: mol_type = other DNA
accttccagtcgttg

SEQ ID NO: 10278 - DNA, 15 bp, synthetic construct
  source 1..15: mol_type = other DNA
gatagcggaatttta

SEQ ID NO: 10279 - DNA, 15 bp, synthetic construct
  source 1..15: mol_type = other DNA
cccagaagcatttgg

SEQ ID NO: 10280 - DNA, 15 bp, synthetic construct
  source 1..15: mol_type = other DNA
tggccctttatcaag

SEQ ID NO: 10281 - DNA, 15 bp, synthetic construct
  source 1..15: mol_type = other DNA
atcccgaacagcagg

SEQ ID NO: 10282 - DNA, 15 bp, synthetic construct
  source 1..15: mol_type = other DNA
actagcactaacgat

SEQ ID NO: 10283 - DNA, 15 bp, synthetic construct
  source 1..15: mol_type = other DNA
ggccgtcatcttgtg

SEQ ID NO: 10284 - DNA, 15 bp, synthetic construct
  source 1..15: mol_type = other DNA
ctgaagctgtgatct

SEQ ID NO: 10285 - DNA, 15 bp, synthetic construct
  source 1..15: mol_type = other DNA
gatcatgcttcggtt

SEQ ID NO: 10286 - DNA, 15 bp, synthetic construct
  source 1..15: mol_type = other DNA
tgcttccggagttta

SEQ ID NO: 10287 - DNA, 15 bp, synthetic construct
  source 1..15: mol_type = other DNA
ggaacagagcagaga

SEQ ID NO: 10288 - DNA, 15 bp, synthetic construct
  source 1..15: mol_type = other DNA
gagaccatatggtcg

SEQ ID NO: 10289 - DNA, 15 bp, synthetic construct
  source 1..15: mol_type = other DNA
cctgttcctcccgta

SEQ ID NO: 10290 - DNA, 15 bp, synthetic construct
  source 1..15: mol_type = other DNA
gctgtcgtcagaacc

SEQ ID NO: 10291 - DNA, 15 bp, synthetic construct
  source 1..15: mol_type = other DNA
agtatctttgactgt

SEQ ID NO: 10292 - DNA, 15 bp, synthetic construct
  source 1..15: mol_type = other DNA
gccagttctggactg

SEQ ID NO: 10293 - DNA, 15 bp, synthetic construct
  source 1..15: mol_type = other DNA
ttcatagggcttcag

SEQ ID NO: 10294 - DNA, 15 bp, synthetic construct
  source 1..15: mol_type = other DNA
gctgggcaaagaatg

SEQ ID NO: 10295 - DNA, 15 bp, synthetic construct
  source 1..15: mol_type = other DNA
ttgcctggtgaatga

SEQ ID NO: 10296 - DNA, 15 bp, synthetic construct
  source 1..15: mol_type = other DNA
ggctctagtataata

SEQ ID NO: 10297 - DNA, 15 bp, synthetic construct
  source 1..15: mol_type = other DNA
tggtgactgttttaa

SEQ ID NO: 10298 - DNA, 15 bp, synthetic construct
  source 1..15: mol_type = other DNA
ccacaatctcatttg

SEQ ID NO: 10299 - DNA, 15 bp, synthetic construct
  source 1..15: mol_type = other DNA
ttacgctgtctagcc

SEQ ID NO: 10300 - DNA, 15 bp, synthetic construct
  source 1..15: mol_type = other DNA
ctgacgctcactgca

SEQ ID NO: 10301 - DNA, 15 bp, synthetic construct
  source 1..15: mol_type = other DNA
cgcagccagattgtg

SEQ ID NO: 10302 - DNA, 15 bp, synthetic construct
  source 1..15: mol_type = other DNA
caacgttccaaaatc

SEQ ID NO: 10303 - DNA, 15 bp, synthetic construct
  source 1..15: mol_type = other DNA
agtgatagagggtgt

SEQ ID NO: 10304 - DNA, 15 bp, synthetic construct
  source 1..15: mol_type = other DNA
cacataggcctatcc

SEQ ID NO: 10305 - DNA, 15 bp, synthetic construct
  source 1..15: mol_type = other DNA
tgcactgtgtttgga

SEQ ID NO: 10306 - DNA, 15 bp, synthetic construct
  source 1..15: mol_type = other DNA
tatttcatctgcctg

SEQ ID NO: 10307 - DNA, 15 bp, synthetic construct
  source 1..15: mol_type = other DNA
atagtcagcattgta

SEQ ID NO: 10308 - DNA, 15 bp, synthetic construct
  source 1..15: mol_type = other DNA
gccctcgcttatgat

SEQ ID NO: 10309 - DNA, 15 bp, synthetic construct
  source 1..15: mol_type = other DNA
cattcaggatgctcc

SEQ ID NO: 10310 - DNA, 15 bp, synthetic construct
  source 1..15: mol_type = other DNA
cgccgtgtctggtct

SEQ ID NO: 10311 - DNA, 15 bp, synthetic construct
  source 1..15: mol_type = other DNA
tgtccgggtacaatc

SEQ ID NO: 10312 - DNA, 15 bp, synthetic construct
  source 1..15: mol_type = other DNA
atacacctcggtttt

SEQ ID NO: 10313 - DNA, 15 bp, synthetic construct
  source 1..15: mol_type = other DNA
tgtgatactttctgt

SEQ ID NO: 10314 - DNA, 15 bp, synthetic construct
  source 1..15: mol_type = other DNA
tacacaacccaaatt

SEQ ID NO: 10315 - DNA, 15 bp, synthetic construct
  source 1..15: mol_type = other DNA
gaagaacgttttgga

SEQ ID NO: 10316 - DNA, 15 bp, synthetic construct
  source 1..15: mol_type = other DNA
ggagtgcgtatgcaa

SEQ ID NO: 10317 - DNA, 15 bp, synthetic construct
  source 1..15: mol_type = other DNA
aattcctcataaagg

SEQ ID NO: 10318 - DNA, 15 bp, synthetic construct
  source 1..15: mol_type = other DNA
gagacgtcgttaagt

SEQ ID NO: 10319 - DNA, 15 bp, synthetic construct
  source 1..15: mol_type = other DNA
ctgaagcttctgcaa

SEQ ID NO: 10320 - DNA, 15 bp, synthetic construct
  source 1..15: mol_type = other DNA
tgcggaagcgaaggg

SEQ ID NO: 10321 - DNA, 15 bp, synthetic construct
  source 1..15: mol_type = other DNA
acatttagtctcggc

SEQ ID NO: 10322 - DNA, 15 bp, synthetic construct
  source 1..15: mol_type = other DNA
ctcggatgcaggatg

SEQ ID NO: 10323 - DNA, 15 bp, synthetic construct
  source 1..15: mol_type = other DNA
agcttgttatctgaa

SEQ ID NO: 10324 - DNA, 15 bp, synthetic construct
  source 1..15: mol_type = other DNA
gctgcatggacgcag

SEQ ID NO: 10325 - DNA, 15 bp, synthetic construct
  source 1..15: mol_type = other DNA
tcacactagtgagct

SEQ ID NO: 10326 - DNA, 15 bp, synthetic construct
  source 1..15: mol_type = other DNA
ttactaagctctgtt

SEQ ID NO: 10327 - DNA, 15 bp, synthetic construct
  source 1..15: mol_type = other DNA
gaccggaagttgaag

SEQ ID NO: 10328 - DNA, 15 bp, synthetic construct
  source 1..15: mol_type = other DNA
cactttgattgtaac

SEQ ID NO: 10329 - DNA, 15 bp, synthetic construct
  source 1..15: mol_type = other DNA
tggtgtctgtagctc

SEQ ID NO: 10330 - DNA, 15 bp, synthetic construct
  source 1..15: mol_type = other DNA
tgagccgtgtacaag

SEQ ID NO: 10331 - DNA, 15 bp, synthetic construct
  source 1..15: mol_type = other DNA
tttacattttagggc

SEQ ID NO: 10332 - DNA, 15 bp, synthetic construct
  source 1..15: mol_type = other DNA
gtttcttttgatgca

SEQ ID NO: 10333 - DNA, 15 bp, synthetic construct
  source 1..15: mol_type = other DNA
gagcagaacatttcc

SEQ ID NO: 10334 - DNA, 15 bp, synthetic construct
  source 1..15: mol_type = other DNA
tttcccacatcacgt

SEQ ID NO: 10335 - DNA, 15 bp, synthetic construct
  source 1..15: mol_type = other DNA
atgagtctcagagag

SEQ ID NO: 10336 - DNA, 15 bp, synthetic construct
  source 1..15: mol_type = other DNA
ctgaagaccacgtga

SEQ ID NO: 10337 - DNA, 15 bp, synthetic construct
  source 1..15: mol_type = other DNA
ggtgactgtttagca

SEQ ID NO: 10338 - DNA, 15 bp, synthetic construct
  source 1..15: mol_type = other DNA
ctgattctggtgcaa

SEQ ID NO: 10339 - DNA, 15 bp, synthetic construct
  source 1..15: mol_type = other DNA
tttaagaggtttgcc

SEQ ID NO: 10340 - DNA, 15 bp, synthetic construct
  source 1..15: mol_type = other DNA
atgcgcttccagagt

SEQ ID NO: 10341 - DNA, 15 bp, synthetic construct
  source 1..15: mol_type = other DNA
acacaaggacatcac

SEQ ID NO: 10342 - DNA, 15 bp, synthetic construct
  source 1..15: mol_type = other DNA
gttcggtgagggttt

SEQ ID NO: 10343 - DNA, 15 bp, synthetic construct
  source 1..15: mol_type = other DNA
cccaggttccattct

SEQ ID NO: 10344 - DNA, 15 bp, synthetic construct
  source 1..15: mol_type = other DNA
taggcattctgttta

SEQ ID NO: 10345 - DNA, 15 bp, synthetic construct
  source 1..15: mol_type = other DNA
tgatcaataaccttc

SEQ ID NO: 10346 - DNA, 15 bp, synthetic construct
  source 1..15: mol_type = other DNA
gtttctcaaagccag

SEQ ID NO: 10347 - DNA, 15 bp, synthetic construct
  source 1..15: mol_type = other DNA
tgaaatccacatcat

SEQ ID NO: 10348 - DNA, 15 bp, synthetic construct
  source 1..15: mol_type = other DNA
ttttgaacacttgac

SEQ ID NO: 10349 - DNA, 15 bp, synthetic construct
  source 1..15: mol_type = other DNA
acatgccggttatcc

SEQ ID NO: 10350 - DNA, 15 bp, synthetic construct
  source 1..15: mol_type = other DNA
atgtagccctcaaag

SEQ ID NO: 10351 - DNA, 15 bp, synthetic construct
  source 1..15: mol_type = other DNA
tcctctgtgagagac

SEQ ID NO: 10352 - DNA, 15 bp, synthetic construct
  source 1..15: mol_type = other DNA
gcagaaaaactgaag

SEQ ID NO: 10353 - DNA, 15 bp, synthetic construct
  source 1..15: mol_type = other DNA
tccttcacttggttt

SEQ ID NO: 10354 - DNA, 15 bp, synthetic construct
  source 1..15: mol_type = other DNA
atacccaactaacat

SEQ ID NO: 10355 - DNA, 15 bp, synthetic construct
  source 1..15: mol_type = other DNA
tgcaggagtttgtcc

SEQ ID NO: 10356 - DNA, 15 bp, synthetic construct
  source 1..15: mol_type = other DNA
gtacttcctcccttg

SEQ ID NO: 10357 - DNA, 15 bp, synthetic construct
  source 1..15: mol_type = other DNA
aacttcttaacagca

SEQ ID NO: 10358 - DNA, 15 bp, synthetic construct
  source 1..15: mol_type = other DNA
gccagagaggtttaa

SEQ ID NO: 10359 - DNA, 15 bp, synthetic construct
  source 1..15: mol_type = other DNA
ctttgcacattttgg

SEQ ID NO: 10360 - DNA, 15 bp, synthetic construct
  source 1..15: mol_type = other DNA
ccgctgagaggtcta

SEQ ID NO: 10361 - DNA, 15 bp, synthetic construct
  source 1..15: mol_type = other DNA
ggataggcagtttgg

SEQ ID NO: 10362 - DNA, 15 bp, synthetic construct
  source 1..15: mol_type = other DNA
agccatcttggcagg

SEQ ID NO: 10363 - DNA, 15 bp, synthetic construct
  source 1..15: mol_type = other DNA
tctcattgtacggaa

SEQ ID NO: 10364 - DNA, 15 bp, synthetic construct
  source 1..15: mol_type = other DNA
tctcgtttgcctcag

SEQ ID NO: 10365 - DNA, 15 bp, synthetic construct
  source 1..15: mol_type = other DNA
ggtgagagaacaagt

SEQ ID NO: 10366 - DNA, 15 bp, synthetic construct
  source 1..15: mol_type = other DNA
agcaattgttggcag

SEQ ID NO: 10367 - DNA, 15 bp, synthetic construct
  source 1..15: mol_type = other DNA
ggtatggagagtagg

SEQ ID NO: 10368 - DNA, 15 bp, synthetic construct
  source 1..15: mol_type = other DNA
cccgaaaacgctcta

SEQ ID NO: 10369 - DNA, 15 bp, synthetic construct
  source 1..15: mol_type = other DNA
tgcagtgtaccttaa

SEQ ID NO: 10370 - DNA, 15 bp, synthetic construct
  source 1..15: mol_type = other DNA
ctccatcctattgaa

SEQ ID NO: 10371 - DNA, 15 bp, synthetic construct
  source 1..15: mol_type = other DNA
atgccaatgagcact

SEQ ID NO: 10372 - DNA, 15 bp, synthetic construct
  source 1..15: mol_type = other DNA
accaagatgcaccaa

SEQ ID NO: 10373 - DNA, 15 bp, synthetic construct
  source 1..15: mol_type = other DNA
ctctttaggagcctc

SEQ ID NO: 10374 - DNA, 15 bp, synthetic construct
  source 1..15: mol_type = other DNA
tgcaagccagatatg

SEQ ID NO: 10375 - DNA, 15 bp, synthetic construct
  source 1..15: mol_type = other DNA
tccattgtaatctga

SEQ ID NO: 10376 - DNA, 15 bp, synthetic construct
  source 1..15: mol_type = other DNA
aaattatccaagcac

SEQ ID NO: 10377 - DNA, 15 bp, synthetic construct
  source 1..15: mol_type = other DNA
ggcactttccaaggt

SEQ ID NO: 10378 - DNA, 15 bp, synthetic construct
  source 1..15: mol_type = other DNA
tgattccaaatgcca

SEQ ID NO: 10379 - DNA, 15 bp, synthetic construct
  source 1..15: mol_type = other DNA
atgtaggtgttaggc

SEQ ID NO: 10380 - DNA, 15 bp, synthetic construct
  source 1..15: mol_type = other DNA
ttgctggattccaga

SEQ ID NO: 10381 - DNA, 15 bp, synthetic construct
  source 1..15: mol_type = other DNA
ggttaccctttgctg

SEQ ID NO: 10382 - DNA, 15 bp, synthetic construct
  source 1..15: mol_type = other DNA
ctgttactggtggat

SEQ ID NO: 10383 - DNA, 15 bp, synthetic construct
  source 1..15: mol_type = other DNA
tggacatgaagagag

SEQ ID NO: 10384 - DNA, 15 bp, synthetic construct
  source 1..15: mol_type = other DNA
tccgataggcgtgct

SEQ ID NO: 10385 - DNA, 15 bp, synthetic construct
  source 1..15: mol_type = other DNA
cggacccgtgtttca

SEQ ID NO: 10386 - DNA, 15 bp, synthetic construct
  source 1..15: mol_type = other DNA
tctggaactagagtg

SEQ ID NO: 10387 - DNA, 15 bp, synthetic construct
  source 1..15: mol_type = other DNA
ctccatagtatggtt

SEQ ID NO: 10388 - DNA, 15 bp, synthetic construct
  source 1..15: mol_type = other DNA
tcgttctcccttctg

SEQ ID NO: 10389 - DNA, 15 bp, synthetic construct
  source 1..15: mol_type = other DNA
attaacacaagctgt

SEQ ID NO: 10390 - DNA, 15 bp, synthetic construct
  source 1..15: mol_type = other DNA
agtgtacagtgctga

SEQ ID NO: 10391 - DNA, 15 bp, synthetic construct
  source 1..15: mol_type = other DNA
gttgaaacaggtatc

SEQ ID NO: 10392 - DNA, 15 bp, synthetic construct
  source 1..15: mol_type = other DNA
gagcaaaaaatagtc

SEQ ID NO: 10393 - DNA, 15 bp, synthetic construct
  source 1..15: mol_type = other DNA
tcctctcacatccga

SEQ ID NO: 10394 - DNA, 15 bp, synthetic construct
  source 1..15: mol_type = other DNA
gaaatcagtcgcaag

SEQ ID NO: 10395 - DNA, 15 bp, synthetic construct
  source 1..15: mol_type = other DNA
ttcttcgtgcatgga

SEQ ID NO: 10396 - DNA, 15 bp, synthetic construct
  source 1..15: mol_type = other DNA
gtttatcttggactt

SEQ ID NO: 10397 - DNA, 15 bp, synthetic construct
  source 1..15: mol_type = other DNA
tctgaattacatagg

SEQ ID NO: 10398 - DNA, 15 bp, synthetic construct
  source 1..15: mol_type = other DNA
tctcccggtcaaaac

SEQ ID NO: 10399 - DNA, 15 bp, synthetic construct
  source 1..15: mol_type = other DNA
ccagctgcgacattt

SEQ ID NO: 10400 - DNA, 15 bp, synthetic construct
  source 1..15: mol_type = other DNA
agctctttgaattcc

SEQ ID NO: 10401 - DNA, 15 bp, synthetic construct
  source 1..15: mol_type = other DNA
ccacagccaagacag

SEQ ID NO: 10402 - DNA, 15 bp, synthetic construct
  source 1..15: mol_type = other DNA
atgaactcctcgaag

SEQ ID NO: 10403 - DNA, 15 bp, synthetic construct
  source 1..15: mol_type = other DNA
gcatttgtgtccagg

SEQ ID NO: 10404 - DNA, 15 bp, synthetic construct
  source 1..15: mol_type = other DNA
tgagatgcttgtggt

SEQ ID NO: 10405 - DNA, 15 bp, synthetic construct
  source 1..15: mol_type = other DNA
tgaaacgctgtgtgg

SEQ ID NO: 10406 - DNA, 15 bp, synthetic construct
  source 1..15: mol_type = other DNA
gtcttgatcagggct

SEQ ID NO: 10407 - DNA, 15 bp, synthetic construct
  source 1..15: mol_type = other DNA
agggtgtgtccatga

SEQ ID NO: 10408 - DNA, 15 bp, synthetic construct
  source 1..15: mol_type = other DNA
cagagtaactacaaa

SEQ ID NO: 10409 - DNA, 15 bp, synthetic construct
  source 1..15: mol_type = other DNA
taaagggaagaatgt

SEQ ID NO: 10410 - DNA, 15 bp, synthetic construct
  source 1..15: mol_type = other DNA
aatctagcaaaatcc

SEQ ID NO: 10411 - DNA, 15 bp, synthetic construct
  source 1..15: mol_type = other DNA
acagaaatgcccaga

SEQ ID NO: 10412 - DNA, 15 bp, synthetic construct
  source 1..15: mol_type = other DNA
gcaggaagatagtta

SEQ ID NO: 10413 - DNA, 15 bp, synthetic construct
  source 1..15: mol_type = other DNA
gcagtttcttcacag

SEQ ID NO: 10414 - DNA, 15 bp, synthetic construct
  source 1..15: mol_type = other DNA
tgtcaacaggaaggg

SEQ ID NO: 10415 - DNA, 15 bp, synthetic construct
  source 1..15: mol_type = other DNA
acacttccttagccc

SEQ ID NO: 10416 - DNA, 15 bp, synthetic construct
  source 1..15: mol_type = other DNA
cacctccgctcttta

SEQ ID NO: 10417 - DNA, 15 bp, synthetic construct
  source 1..15: mol_type = other DNA
tgctttatttgtcct

SEQ ID NO: 10418 - DNA, 15 bp, synthetic construct
  source 1..15: mol_type = other DNA
cagccgtattctccc

SEQ ID NO: 10419 - DNA, 15 bp, synthetic construct
  source 1..15: mol_type = other DNA
ccgagctccgcctta

SEQ ID NO: 10420 - DNA, 15 bp, synthetic construct
  source 1..15: mol_type = other DNA
gctgtggtggaaagg

SEQ ID NO: 10421 - DNA, 15 bp, synthetic construct
  source 1..15: mol_type = other DNA
gaagcgaaggcagtg

SEQ ID NO: 10422 - DNA, 15 bp, synthetic construct
  source 1..15: mol_type = other DNA
gtgggaatagccgtc

SEQ ID NO: 10423 - DNA, 15 bp, synthetic construct
  source 1..15: mol_type = other DNA
ggccatttaggtcca

SEQ ID NO: 10424 - DNA, 15 bp, synthetic construct
  source 1..15: mol_type = other DNA
tcacttctcacacgg

SEQ ID NO: 10425 - DNA, 15 bp, synthetic construct
  source 1..15: mol_type = other DNA
ctactgtacagggaa

SEQ ID NO: 10426 - DNA, 15 bp, synthetic construct
  source 1..15: mol_type = other DNA
ctgtggtcgttgagg

SEQ ID NO: 10427 - DNA, 15 bp, synthetic construct
  source 1..15: mol_type = other DNA
agaagtaacaaggtc

SEQ ID NO: 10428 - DNA, 15 bp, synthetic construct
  source 1..15: mol_type = other DNA
ctcggagtggccaac

SEQ ID NO: 10429 - DNA, 15 bp, synthetic construct
  source 1..15: mol_type = other DNA
ttattgtcgttacac

SEQ ID NO: 10430 - DNA, 15 bp, synthetic construct
  source 1..15: mol_type = other DNA
cgctctctactgccg

SEQ ID NO: 10431 - DNA, 15 bp, synthetic construct
  source 1..15: mol_type = other DNA
accctgttgcacaca

SEQ ID NO: 10432 - DNA, 15 bp, synthetic construct
  source 1..15: mol_type = other DNA
aagatgcttggtcct

SEQ ID NO: 10433 - DNA, 15 bp, synthetic construct
  source 1..15: mol_type = other DNA
tgctgtctcccgacc

SEQ ID NO: 10434 - DNA, 15 bp, synthetic construct
  source 1..15: mol_type = other DNA
ttcgtccttcttctt

SEQ ID NO: 10435 - DNA, 15 bp, synthetic construct
  source 1..15: mol_type = other DNA
gaaagtcgcagtatc

SEQ ID NO: 10436 - DNA, 15 bp, synthetic construct
  source 1..15: mol_type = other DNA
acctccaggagaatt

SEQ ID NO: 10437 - DNA, 15 bp, synthetic construct
  source 1..15: mol_type = other DNA
cagccttataaaacc

SEQ ID NO: 10438 - DNA, 15 bp, synthetic construct
  source 1..15: mol_type = other DNA
gagaaaccgagtcag

SEQ ID NO: 10439 - DNA, 15 bp, synthetic construct
  source 1..15: mol_type = other DNA
gtttgcagaaaagtc

SEQ ID NO: 10440 - DNA, 15 bp, synthetic construct
  source 1..15: mol_type = other DNA
cccgagtcatgtgca

SEQ ID NO: 10441 - DNA, 15 bp, synthetic construct
  source 1..15: mol_type = other DNA
tggcttgtttcggct

SEQ ID NO: 10442 - DNA, 15 bp, synthetic construct
  source 1..15: mol_type = other DNA
cactgcccttgagtg

SEQ ID NO: 10443 - DNA, 15 bp, synthetic construct
  source 1..15: mol_type = other DNA
tgtgcatagtaaccc

SEQ ID NO: 10444 - DNA, 15 bp, synthetic construct
  source 1..15: mol_type = other DNA
ttttggaaacattcc

SEQ ID NO: 10445 - DNA, 15 bp, synthetic construct
  source 1..15: mol_type = other DNA
actgcagctcatgtt

SEQ ID NO: 10446 - DNA, 15 bp, synthetic construct
  source 1..15: mol_type = other DNA
tggcctcatcataag

SEQ ID NO: 10447 - DNA, 15 bp, synthetic construct
  source 1..15: mol_type = other DNA
tattgatggtctcta

SEQ ID NO: 10448 - DNA, 15 bp, synthetic construct
  source 1..15: mol_type = other DNA
cgcagtcctcatctt

SEQ ID NO: 10449 - DNA, 15 bp, synthetic construct
  source 1..15: mol_type = other DNA
acacgttggcttctc

SEQ ID NO: 10450 - DNA, 15 bp, synthetic construct
  source 1..15: mol_type = other DNA
gcatagggcaagctt

SEQ ID NO: 10451 - DNA, 15 bp, synthetic construct
  source 1..15: mol_type = other DNA
ccaaagtgagagctg

SEQ ID NO: 10452 - DNA, 15 bp, synthetic construct
  source 1..15: mol_type = other DNA
gctcaagttttaaca

SEQ ID NO: 10453 - DNA, 15 bp, synthetic construct
  source 1..15: mol_type = other DNA
agaacagctgaacac

SEQ ID NO: 10454 - DNA, 15 bp, synthetic construct
  source 1..15: mol_type = other DNA
cttctgtccattgtc

SEQ ID NO: 10455 - DNA, 15 bp, synthetic construct
  source 1..15: mol_type = other DNA
aagaggacttgtagg

SEQ ID NO: 10456 - DNA, 15 bp, synthetic construct
  source 1..15: mol_type = other DNA
taggaagacaattca

SEQ ID NO: 10457 - DNA, 15 bp, synthetic construct
  source 1..15: mol_type = other DNA
agtataggagttttg

SEQ ID NO: 10458 - DNA, 15 bp, synthetic construct
  source 1..15: mol_type = other DNA
aaatgtacaggttgt

SEQ ID NO: 10459 - DNA, 15 bp, synthetic construct
  source 1..15: mol_type = other DNA
tgcttggcaggtaac

SEQ ID NO: 10460 - DNA, 15 bp, synthetic construct
  source 1..15: mol_type = other DNA
ctccatgcatttgcc

SEQ ID NO: 10461 - DNA, 15 bp, synthetic construct
  source 1..15: mol_type = other DNA
caggtgaagttgcag

SEQ ID NO: 10462 - DNA, 15 bp, synthetic construct
  source 1..15: mol_type = other DNA
agcttccatctgatt

SEQ ID NO: 10463 - DNA, 15 bp, synthetic construct
  source 1..15: mol_type = other DNA
gaagaattgtagctg

SEQ ID NO: 10464 - DNA, 15 bp, synthetic construct
  source 1..15: mol_type = other DNA
ccagaggagaaatgg

SEQ ID NO: 10465 - DNA, 15 bp, synthetic construct
  source 1..15: mol_type = other DNA
agaactcacagctgg

SEQ ID NO: 10466 - DNA, 15 bp, synthetic construct
  source 1..15: mol_type = other DNA
cacaacttgaagatg

SEQ ID NO: 10467 - DNA, 15 bp, synthetic construct
  source 1..15: mol_type = other DNA
ttggttctggagatg

SEQ ID NO: 10468 - DNA, 15 bp, synthetic construct
  source 1..15: mol_type = other DNA
gggtttttcagaata

SEQ ID NO: 10469 - DNA, 15 bp, synthetic construct
  source 1..15: mol_type = other DNA
ggaaacacacttcat

SEQ ID NO: 10470 - DNA, 15 bp, synthetic construct
  source 1..15: mol_type = other DNA
cctcttgacttagca

SEQ ID NO: 10471 - DNA, 15 bp, synthetic construct
  source 1..15: mol_type = other DNA
aatctccttgccagc

SEQ ID NO: 10472 - DNA, 15 bp, synthetic construct
  source 1..15: mol_type = other DNA
cttgttcttcttgtt

SEQ ID NO: 10473 - DNA, 15 bp, synthetic construct
  source 1..15: mol_type = other DNA
aagagtcaagaaaga

SEQ ID NO: 10474 - DNA, 15 bp, synthetic construct
  source 1..15: mol_type = other DNA
atattggactaggat

SEQ ID NO: 10475 - DNA, 15 bp, synthetic construct
  source 1..15: mol_type = other DNA
gcagtaaccatgact

SEQ ID NO: 10476 - DNA, 15 bp, synthetic construct
  source 1..15: mol_type = other DNA
ctacagttcatgatc

SEQ ID NO: 10477 - DNA, 15 bp, synthetic construct
  source 1..15: mol_type = other DNA
ggctgaagccagtta

SEQ ID NO: 10478 - DNA, 15 bp, synthetic construct
  source 1..15: mol_type = other DNA
catattcctcctatc

SEQ ID NO: 10479 - DNA, 15 bp, synthetic construct
  source 1..15: mol_type = other DNA
agtttcccaaagggt

SEQ ID NO: 10480 - DNA, 15 bp, synthetic construct
  source 1..15: mol_type = other DNA
aatcccagttaagtt

SEQ ID NO: 10481 - DNA, 15 bp, synthetic construct
  source 1..15: mol_type = other DNA
gaagctgaaggaact

SEQ ID NO: 10482 - DNA, 15 bp, synthetic construct
  source 1..15: mol_type = other DNA
ctgagcagatgaagg

SEQ ID NO: 10483 - DNA, 15 bp, synthetic construct
  source 1..15: mol_type = other DNA
tttagtttgtggcag

SEQ ID NO: 10484 - DNA, 15 bp, synthetic construct
  source 1..15: mol_type = other DNA
cttcagtaagagatt

SEQ ID NO: 10485 - DNA, 15 bp, synthetic construct
  source 1..15: mol_type = other DNA
gctgcaggtagactg

SEQ ID NO: 10486 - DNA, 15 bp, synthetic construct
  source 1..15: mol_type = other DNA
cccacatcacagttg

SEQ ID NO: 10487 - DNA, 15 bp, synthetic construct
  source 1..15: mol_type = other DNA
agtagtaagaacgac

SEQ ID NO: 10488 - DNA, 15 bp, synthetic construct
  source 1..15: mol_type = other DNA
caactaaatctgtgt

SEQ ID NO: 10489 - DNA, 15 bp, synthetic construct
  source 1..15: mol_type = other DNA
tcatttctctaaccc

SEQ ID NO: 10490 - DNA, 15 bp, synthetic construct
  source 1..15: mol_type = other DNA
aaatacagtggttca

SEQ ID NO: 10491 - DNA, 15 bp, synthetic construct
  source 1..15: mol_type = other DNA
ggttcatattagacg

SEQ ID NO: 10492 - DNA, 15 bp, synthetic construct
  source 1..15: mol_type = other DNA
agccctcaactgatc

SEQ ID NO: 10493 - DNA, 15 bp, synthetic construct
  source 1..15: mol_type = other DNA
attgtcaatcctttc

SEQ ID NO: 10494 - DNA, 15 bp, synthetic construct
  source 1..15: mol_type = other DNA
tcctgaaactacaag

SEQ ID NO: 10495 - DNA, 15 bp, synthetic construct
  source 1..15: mol_type = other DNA
tcactctgcttcatt

SEQ ID NO: 10496 - DNA, 15 bp, synthetic construct
  source 1..15: mol_type = other DNA
gcagcaagaccaaag

SEQ ID NO: 10497 - DNA, 15 bp, synthetic construct
  source 1..15: mol_type = other DNA
ctatggtccttagct

SEQ ID NO: 10498 - DNA, 15 bp, synthetic construct
  source 1..15: mol_type = other DNA
aaaaatcaagcccaa

SEQ ID NO: 10499 - DNA, 15 bp, synthetic construct
  source 1..15: mol_type = other DNA
cctgaggagaaatgg

SEQ ID NO: 10500 - DNA, 15 bp, synthetic construct
  source 1..15: mol_type = other DNA
aaaagcaaagctcct

SEQ ID NO: 10501 - DNA, 15 bp, synthetic construct
  source 1..15: mol_type = other DNA
cttagaacatgctgg

SEQ ID NO: 10502 - DNA, 15 bp, synthetic construct
  source 1..15: mol_type = other DNA
gaaaccatgcatgag

SEQ ID NO: 10503 - DNA, 15 bp, synthetic construct
  source 1..15: mol_type = other DNA
tacatctctcaacct

SEQ ID NO: 10504 - DNA, 15 bp, synthetic construct
  source 1..15: mol_type = other DNA
aggaagaatcacctg

SEQ ID NO: 10505 - DNA, 15 bp, synthetic construct
  source 1..15: mol_type = other DNA
accaaagtagaaccc

SEQ ID NO: 10506 - DNA, 15 bp, synthetic construct
  source 1..15: mol_type = other DNA
tcagaaactatgcaa

SEQ ID NO: 10507 - DNA, 15 bp, synthetic construct
  source 1..15: mol_type = other DNA
tccctggacattggt

SEQ ID NO: 10508 - DNA, 15 bp, synthetic construct
  source 1..15: mol_type = other DNA
caggctgaggattca

SEQ ID NO: 10509 - DNA, 15 bp, synthetic construct
  source 1..15: mol_type = other DNA
aggttcagtccaatc

SEQ ID NO: 10510 - DNA, 15 bp, synthetic construct
  source 1..15: mol_type = other DNA
tctcagggtgcaaat

SEQ ID NO: 10511 - DNA, 15 bp, synthetic construct
  source 1..15: mol_type = other DNA
ttgttgccattttct

SEQ ID NO: 10512 - DNA, 15 bp, synthetic construct
  source 1..15: mol_type = other DNA
aagtgtaaattccac

SEQ ID NO: 10513 - DNA, 15 bp, synthetic construct
  source 1..15: mol_type = other DNA
gatctcatcctaggg

SEQ ID NO: 10514 - DNA, 15 bp, synthetic construct
  source 1..15: mol_type = other DNA
acttgtccctgtaag

SEQ ID NO: 10515 - DNA, 15 bp, synthetic construct
  source 1..15: mol_type = other DNA
gtcattccacttgcc

SEQ ID NO: 10516 - DNA, 15 bp, synthetic construct
  source 1..15: mol_type = other DNA
gttggaatagaccag

SEQ ID NO: 10517 - DNA, 15 bp, synthetic construct
  source 1..15: mol_type = other DNA
gctacacatgaccag

SEQ ID NO: 10518 - DNA, 15 bp, synthetic construct
  source 1..15: mol_type = other DNA
tcagaactcgcagac

SEQ ID NO: 10519 - DNA, 15 bp, synthetic construct
  source 1..15: mol_type = other DNA
tgtgcctccgtaaat

SEQ ID NO: 10520 - DNA, 15 bp, synthetic construct
  source 1..15: mol_type = other DNA
ggtcacctttttatt

SEQ ID NO: 10521 - DNA, 15 bp, synthetic construct
  source 1..15: mol_type = other DNA
cagcctcgttcttag

SEQ ID NO: 10522 - DNA, 15 bp, synthetic construct
  source 1..15: mol_type = other DNA
tgaaaatcttctccc

SEQ ID NO: 10523 - DNA, 15 bp, synthetic construct
  source 1..15: mol_type = other DNA
cggcattctcagcgg

SEQ ID NO: 10524 - DNA, 15 bp, synthetic construct
  source 1..15: mol_type = other DNA
gcccatgtttggagg

SEQ ID NO: 10525 - DNA, 15 bp, synthetic construct
  source 1..15: mol_type = other DNA
ctctgtcttggaatc

SEQ ID NO: 10526 - DNA, 15 bp, synthetic construct
  source 1..15: mol_type = other DNA
agtcctctgacccgc

SEQ ID NO: 10527 - DNA, 15 bp, synthetic construct
  source 1..15: mol_type = other DNA
gtgccataaaggttg

SEQ ID NO: 10528 - DNA, 15 bp, synthetic construct
  source 1..15: mol_type = other DNA
ggcagctcatactta

SEQ ID NO: 10529 - DNA, 15 bp, synthetic construct
  source 1..15: mol_type = other DNA
tgtacttcgctgtgg

SEQ ID NO: 10530 - DNA, 15 bp, synthetic construct
  source 1..15: mol_type = other DNA
agggctccattgttc

SEQ ID NO: 10531 - DNA, 15 bp, synthetic construct
  source 1..15: mol_type = other DNA
tggatccggctcaca

SEQ ID NO: 10532 - DNA, 15 bp, synthetic construct
  source 1..15: mol_type = other DNA
cacggttccttcatc

SEQ ID NO: 10533 - DNA, 15 bp, synthetic construct
  source 1..15: mol_type = other DNA
gacttggaagctgag

SEQ ID NO: 10534 - DNA, 15 bp, synthetic construct
  source 1..15: mol_type = other DNA
tttgtaagtggagca

SEQ ID NO: 10535 - DNA, 15 bp, synthetic construct
  source 1..15: mol_type = other DNA
agagggtgccacatg

SEQ ID NO: 10536 - DNA, 15 bp, synthetic construct
  source 1..15: mol_type = other DNA
gcggtcacagttccc

SEQ ID NO: 10537 - DNA, 15 bp, synthetic construct
  source 1..15: mol_type = other DNA
gatgtgagaggatcc

SEQ ID NO: 10538 - DNA, 15 bp, synthetic construct
  source 1..15: mol_type = other DNA
cctagtgaactgggc

SEQ ID NO: 10539 - DNA, 15 bp, synthetic construct
  source 1..15: mol_type = other DNA
cgccggatgggaatg

SEQ ID NO: 10540 - DNA, 15 bp, synthetic construct
  source 1..15: mol_type = other DNA
gctggcgcaatcttt

SEQ ID NO: 10541 - DNA, 15 bp, synthetic construct
  source 1..15: mol_type = other DNA
cttggcttgtaaacg

SEQ ID NO: 10542 - DNA, 15 bp, synthetic construct
  source 1..15: mol_type = other DNA
tgtgcaaggtaggcc

SEQ ID NO: 10543 - DNA, 15 bp, synthetic construct
  source 1..15: mol_type = other DNA
aacactaatgtgctt

SEQ ID NO: 10544 - DNA, 15 bp, synthetic construct
  source 1..15: mol_type = other DNA
ttctccaacaatcca

SEQ ID NO: 10545 - DNA, 15 bp, synthetic construct
  source 1..15: mol_type = other DNA
aagaagccttcaccc

SEQ ID NO: 10546 - DNA, 15 bp, synthetic construct
  source 1..15: mol_type = other DNA
ggtcttccactgtgg

SEQ ID NO: 10547 - DNA, 15 bp, synthetic construct
  source 1..15: mol_type = other DNA
cactgcattagcaaa

SEQ ID NO: 10548 - DNA, 15 bp, synthetic construct
  source 1..15: mol_type = other DNA
aatccggatgtcatt

SEQ ID NO: 10549 - DNA, 15 bp, synthetic construct
  source 1..15: mol_type = other DNA
ccacctcattgaggc

SEQ ID NO: 10550 - DNA, 15 bp, synthetic construct
  source 1..15: mol_type = other DNA
gcgcctgcatcatct

SEQ ID NO: 10551 - DNA, 15 bp, synthetic construct
  source 1..15: mol_type = other DNA
cgagtagaaggcctt

SEQ ID NO: 10552 - DNA, 15 bp, synthetic construct
  source 1..15: mol_type = other DNA
agcgtctcgggagta

SEQ ID NO: 10553 - DNA, 15 bp, synthetic construct
  source 1..15: mol_type = other DNA
agaacattccgaaga

SEQ ID NO: 10554 - DNA, 15 bp, synthetic construct
  source 1..15: mol_type = other DNA
gtagaggatcacgcc

SEQ ID NO: 10555 - DNA, 15 bp, synthetic construct
  source 1..15: mol_type = other DNA
aggatgtggacttca

SEQ ID NO: 10556 - DNA, 15 bp, synthetic construct
  source 1..15: mol_type = other DNA
tgtcaatctgctttt

SEQ ID NO: 10557 - DNA, 15 bp, synthetic construct
  source 1..15: mol_type = other DNA
gctgaagttgatgag

SEQ ID NO: 10558 - DNA, 15 bp, synthetic construct
  source 1..15: mol_type = other DNA
cgccgcccacttgtt

SEQ ID NO: 10559 - DNA, 15 bp, synthetic construct
  source 1..15: mol_type = other DNA
tgaagccatcattca

SEQ ID NO: 10560 - DNA, 15 bp, synthetic construct
  source 1..15: mol_type = other DNA
tggtaatagttgatg

SEQ ID NO: 10561 - DNA, 15 bp, synthetic construct
  source 1..15: mol_type = other DNA
ccgtgaccgacagca

SEQ ID NO: 10562 - DNA, 15 bp, synthetic construct
  source 1..15: mol_type = other DNA
gcatcctcatgacac

SEQ ID NO: 10563 - DNA, 15 bp, synthetic construct
  source 1..15: mol_type = other DNA
ccatagcctttgccg

SEQ ID NO: 10564 - DNA, 15 bp, synthetic construct
  source 1..15: mol_type = other DNA
caccagaatgttggg

SEQ ID NO: 10565 - DNA, 15 bp, synthetic construct
  source 1..15: mol_type = other DNA
acacccacggcattg

SEQ ID NO: 10566 - DNA, 15 bp, synthetic construct
  source 1..15: mol_type = other DNA
aagagccagtagatg

SEQ ID NO: 10567 - DNA, 15 bp, synthetic construct
  source 1..15: mol_type = other DNA
agtgaccgagaccac

SEQ ID NO: 10568 - DNA, 15 bp, synthetic construct
  source 1..15: mol_type = other DNA
gaccatgatgacaag

SEQ ID NO: 10569 - DNA, 15 bp, synthetic construct
  source 1..15: mol_type = other DNA
ggccaggtaggaaat

SEQ ID NO: 10570 - DNA, 15 bp, synthetic construct
  source 1..15: mol_type = other DNA
ccatcctgttaatct

SEQ ID NO: 10571 - DNA, 15 bp, synthetic construct
  source 1..15: mol_type = other DNA
caacagaaaggtggc

SEQ ID NO: 10572 - DNA, 15 bp, synthetic construct
  source 1..15: mol_type = other DNA
ttgggttgtaactcc

SEQ ID NO: 10573 - DNA, 15 bp, synthetic construct
  source 1..15: mol_type = other DNA
ctccgagaacaagct

SEQ ID NO: 10574 - DNA, 15 bp, synthetic construct
  source 1..15: mol_type = other DNA
ctgccatacagacga

SEQ ID NO: 10575 - DNA, 15 bp, synthetic construct
  source 1..15: mol_type = other DNA
ctggacatcaagttc

SEQ ID NO: 10576 - DNA, 15 bp, synthetic construct
  source 1..15: mol_type = other DNA
gctcgtgctgttgct

SEQ ID NO: 10577 - DNA, 15 bp, synthetic construct
  source 1..15: mol_type = other DNA
agctgttgtgaagcc

SEQ ID NO: 10578 - DNA, 15 bp, synthetic construct
  source 1..15: mol_type = other DNA
tgagaagatgttgct

SEQ ID NO: 10579 - DNA, 15 bp, synthetic construct
  source 1..15: mol_type = other DNA
agggactgggatttt

SEQ ID NO: 10580 - DNA, 15 bp, synthetic construct
  source 1..15: mol_type = other DNA
gcgatcatcacaatc

SEQ ID NO: 10581 - DNA, 15 bp, synthetic construct
  source 1..15: mol_type = other DNA
agtagagaccatatc

SEQ ID NO: 10582 - DNA, 15 bp, synthetic construct
  source 1..15: mol_type = other DNA
gttccaaagataaag

SEQ ID NO: 10583 - DNA, 15 bp, synthetic construct
  source 1..15: mol_type = other DNA
gccaagtacctcact

SEQ ID NO: 10584 - DNA, 15 bp, synthetic construct
  source 1..15: mol_type = other DNA
taaggccagctagta

SEQ ID NO: 10585 - DNA, 15 bp, synthetic construct
  source 1..15: mol_type = other DNA
attctgtctccacag

SEQ ID NO: 10586 - DNA, 15 bp, synthetic construct
  source 1..15: mol_type = other DNA
ccatcgacattgcca

SEQ ID NO: 10587 - DNA, 15 bp, synthetic construct
  source 1..15: mol_type = other DNA
gggcagaactttcag

SEQ ID NO: 10588 - DNA, 15 bp, synthetic construct
  source 1..15: mol_type = other DNA
actggcaatcaggac

SEQ ID NO: 10589 - DNA, 15 bp, synthetic construct
  source 1..15: mol_type = other DNA
cccgaaatgacgtca

SEQ ID NO: 10590 - DNA, 15 bp, synthetic construct
  source 1..15: mol_type = other DNA
agggatgcttccaag

SEQ ID NO: 10591 - DNA, 15 bp, synthetic construct
  source 1..15: mol_type = other DNA
ccaacaacgtccagg

SEQ ID NO: 10592 - DNA, 15 bp, synthetic construct
  source 1..15: mol_type = other DNA
tctaaaatggaacct

SEQ ID NO: 10593 - DNA, 15 bp, synthetic construct
  source 1..15: mol_type = other DNA
ggcacaagagtcttt

SEQ ID NO: 10594 - DNA, 15 bp, synthetic construct
  source 1..15: mol_type = other DNA
gcgacaccatgtagc

SEQ ID NO: 10595 - DNA, 15 bp, synthetic construct
  source 1..15: mol_type = other DNA
agatcccaccattaa

SEQ ID NO: 10596 - DNA, 15 bp, synthetic construct
  source 1..15: mol_type = other DNA
ggttcccatcgatgg

SEQ ID NO: 10597 - DNA, 15 bp, synthetic construct
  source 1..15: mol_type = other DNA
ggagccaatcatgcc

SEQ ID NO: 10598 - DNA, 15 bp, synthetic construct
  source 1..15: mol_type = other DNA
ctcctcgttgcggtt

SEQ ID NO: 10599 - DNA, 15 bp, synthetic construct
  source 1..15: mol_type = other DNA
gaaggccgtgttgac

SEQ ID NO: 10600 - DNA, 15 bp, synthetic construct
  source 1..15: mol_type = other DNA
cgccttctcgaagat

SEQ ID NO: 10601 - DNA, 15 bp, synthetic construct
  source 1..15: mol_type = other DNA
actagcgaccggcac

SEQ ID NO: 10602 - DNA, 15 bp, synthetic construct
  source 1..15: mol_type = other DNA
catctcaaaggactt

SEQ ID NO: 10603 - DNA, 15 bp, synthetic construct
  source 1..15: mol_type = other DNA
ggtgacacttcaccc

SEQ ID NO: 10604 - DNA, 15 bp, synthetic construct
  source 1..15: mol_type = other DNA
ccgcagtacacaccg

SEQ ID NO: 10605 - DNA, 15 bp, synthetic construct
  source 1..15: mol_type = other DNA
ccatgtctggttgta

SEQ ID NO: 10606 - DNA, 15 bp, synthetic construct
  source 1..15: mol_type = other DNA
cacccacatacatgg

SEQ ID NO: 10607 - DNA, 15 bp, synthetic construct
  source 1..15: mol_type = other DNA
ctctgactccgaccc

SEQ ID NO: 10608 - DNA, 15 bp, synthetic construct
  source 1..15: mol_type = other DNA
ttttccagaattcca

SEQ ID NO: 10609 - DNA, 15 bp, synthetic construct
  source 1..15: mol_type = other DNA
tctggatgcccgtga

SEQ ID NO: 10610 - DNA, 15 bp, synthetic construct
  source 1..15: mol_type = other DNA
tcagttcaaatccca

SEQ ID NO: 10611 - DNA, 15 bp, synthetic construct
  source 1..15: mol_type = other DNA
gaggaaactgaactg

SEQ ID NO: 10612 - DNA, 15 bp, synthetic construct
  source 1..15: mol_type = other DNA
tcctgagtgtccagt

SEQ ID NO: 10613 - DNA, 15 bp, synthetic construct
  source 1..15: mol_type = other DNA
tcaaaggttgccttg

SEQ ID NO: 10614 - DNA, 15 bp, synthetic construct
  source 1..15: mol_type = other DNA
ggtgatctgagactc

SEQ ID NO: 10615 - DNA, 15 bp, synthetic construct
  source 1..15: mol_type = other DNA
ccctattttacatgt

SEQ ID NO: 10616 - DNA, 15 bp, synthetic construct
  source 1..15: mol_type = other DNA
ctgctccagattctc

SEQ ID NO: 10617 - DNA, 15 bp, synthetic construct
  source 1..15: mol_type = other DNA
gggtgatacttgggt

SEQ ID NO: 10618 - DNA, 15 bp, synthetic construct
  source 1..15: mol_type = other DNA
gccagaaaagccagg

SEQ ID NO: 10619 - DNA, 15 bp, synthetic construct
  source 1..15: mol_type = other DNA
caaagagctggatgc

SEQ ID NO: 10620 - DNA, 15 bp, synthetic construct
  source 1..15: mol_type = other DNA
atgaacttctgcttt

SEQ ID NO: 10621 - DNA, 15 bp, synthetic construct
  source 1..15: mol_type = other DNA
ggagtccactgatcc

SEQ ID NO: 10622 - DNA, 15 bp, synthetic construct
  source 1..15: mol_type = other DNA
gcaaacatcatccag

SEQ ID NO: 10623 - DNA, 15 bp, synthetic construct
  source 1..15: mol_type = other DNA
cactccctatccaaa

SEQ ID NO: 10624 - DNA, 15 bp, synthetic construct
  source 1..15: mol_type = other DNA
tgaccatcttgcgct

SEQ ID NO: 10625 - DNA, 15 bp, synthetic construct
  source 1..15: mol_type = other DNA
ccttggtgaagactc

SEQ ID NO: 10626 - DNA, 15 bp, synthetic construct
  source 1..15: mol_type = other DNA
cactagcaccaacgt

SEQ ID NO: 10627 - DNA, 15 bp, synthetic construct
  source 1..15: mol_type = other DNA
gctcttcaccaacca

SEQ ID NO: 10628 - DNA, 15 bp, synthetic construct
  source 1..15: mol_type = other DNA
gggacatcccagtca

SEQ ID NO: 10629 - DNA, 15 bp, synthetic construct
  source 1..15: mol_type = other DNA
cttcaaagataaacc

SEQ ID NO: 10630 - DNA, 15 bp, synthetic construct
  source 1..15: mol_type = other DNA
atggccacttcgtcg

SEQ ID NO: 10631 - DNA, 15 bp, synthetic construct
  source 1..15: mol_type = other DNA
acgcatgactgacag

SEQ ID NO: 10632 - DNA, 15 bp, synthetic construct
  source 1..15: mol_type = other DNA
tctgggtaccatgag

SEQ ID NO: 10633 - DNA, 15 bp, synthetic construct
  source 1..15: mol_type = other DNA
aggcttctggatagg

SEQ ID NO: 10634 - DNA, 15 bp, synthetic construct
  source 1..15: mol_type = other DNA
ttttgtgctgagatg

SEQ ID NO: 10635 - DNA, 15 bp, synthetic construct
  source 1..15: mol_type = other DNA
ttgatttctggagcc

SEQ ID NO: 10636 - DNA, 15 bp, synthetic construct
  source 1..15: mol_type = other DNA
agcattttgcccaca

SEQ ID NO: 10637 - DNA, 15 bp, synthetic construct
  source 1..15: mol_type = other DNA
tgtcagaagcctttc

SEQ ID NO: 10638 - DNA, 15 bp, synthetic construct
  source 1..15: mol_type = other DNA
ccaaggcagtccaag

SEQ ID NO: 10639 - DNA, 15 bp, synthetic construct
  source 1..15: mol_type = other DNA
tgaaagagaagagca

SEQ ID NO: 10640 - DNA, 15 bp, synthetic construct
  source 1..15: mol_type = other DNA
acccataggcggaag

SEQ ID NO: 10641 - DNA, 15 bp, synthetic construct
  source 1..15: mol_type = other DNA
agagtagcaggtctg

SEQ ID NO: 10642 - DNA, 15 bp, synthetic construct
  source 1..15: mol_type = other DNA
ttgctggcccgacga

SEQ ID NO: 10643 - DNA, 15 bp, synthetic construct
  source 1..15: mol_type = other DNA
ctgtattccatgcgg

SEQ ID NO: 10644 - DNA, 15 bp, synthetic construct
  source 1..15: mol_type = other DNA
tctctctccgaagac

SEQ ID NO: 10645 - DNA, 15 bp, synthetic construct
  source 1..15: mol_type = other DNA
cacttccactgaatg

SEQ ID NO: 10646 - DNA, 15 bp, synthetic construct
  source 1..15: mol_type = other DNA
ccagaggagttcctg

SEQ ID NO: 10647 - DNA, 15 bp, synthetic construct
  source 1..15: mol_type = other DNA
agggttccgcagtcg

SEQ ID NO: 10648 - DNA, 15 bp, synthetic construct
  source 1..15: mol_type = other DNA
gagggcacagaaacc

SEQ ID NO: 10649 - DNA, 15 bp, synthetic construct
  source 1..15: mol_type = other DNA
actgaggagaagtcg

SEQ ID NO: 10650 - DNA, 15 bp, synthetic construct
  source 1..15: mol_type = other DNA
caatgaactgttctc

SEQ ID NO: 10651 - DNA, 15 bp, synthetic construct
  source 1..15: mol_type = other DNA
acagtgttagtcaaa

SEQ ID NO: 10652 - DNA, 15 bp, synthetic construct
  source 1..15: mol_type = other DNA
cctatccgctaccca

SEQ ID NO: 10653 - DNA, 15 bp, synthetic construct
  source 1..15: mol_type = other DNA
gtgtagaaacatgat

SEQ ID NO: 10654 - DNA, 15 bp, synthetic construct
  source 1..15: mol_type = other DNA
cctcaagcacaaggg

SEQ ID NO: 10655 - DNA, 15 bp, synthetic construct
  source 1..15: mol_type = other DNA
gctctccaatctcaa

SEQ ID NO: 10656 - DNA, 15 bp, synthetic construct
  source 1..15: mol_type = other DNA
tctgcttaagttcct

SEQ ID NO: 10657 - DNA, 15 bp, synthetic construct
  source 1..15: mol_type = other DNA
cgaacacgactgcag

SEQ ID NO: 10658 - DNA, 15 bp, synthetic construct
  source 1..15: mol_type = other DNA
cttcaatgatcactt

SEQ ID NO: 10659 - DNA, 15 bp, synthetic construct
  source 1..15: mol_type = other DNA
cagtattcagtaggg

SEQ ID NO: 10660 - DNA, 15 bp, synthetic construct
  source 1..15: mol_type = other DNA
cagctgcatgcctct

SEQ ID NO: 10661 - DNA, 15 bp, synthetic construct
  source 1..15: mol_type = other DNA
ccttgtctctccgtc

SEQ ID NO: 10662 - DNA, 15 bp, synthetic construct
  source 1..15: mol_type = other DNA
ctagcatgaaccttc

SEQ ID NO: 10663 - DNA, 15 bp, synthetic construct
  source 1..15: mol_type = other DNA
agaggacatgaaccg

SEQ ID NO: 10664 - DNA, 15 bp, synthetic construct
  source 1..15: mol_type = other DNA
ttgccagctcgatac

SEQ ID NO: 10665 - DNA, 15 bp, synthetic construct
  source 1..15: mol_type = other DNA
gaagatggcctgtct

SEQ ID NO: 10666 - DNA, 15 bp, synthetic construct
  source 1..15: mol_type = other DNA
agacctccacaacac

SEQ ID NO: 10667 - DNA, 15 bp, synthetic construct
  source 1..15: mol_type = other DNA
ctctcactcacatga

SEQ ID NO: 10668 - DNA, 15 bp, synthetic construct
  source 1..15: mol_type = other DNA
ctgctgacttaggac

SEQ ID NO: 10669 - DNA, 15 bp, synthetic construct
  source 1..15: mol_type = other DNA
ttcagtcacttcagt

SEQ ID NO: 10670 - DNA, 15 bp, synthetic construct
  source 1..15: mol_type = other DNA
atgaaagctgtcagt

SEQ ID NO: 10671 - DNA, 15 bp, synthetic construct
  source 1..15: mol_type = other DNA
aagtgcatcacgtaa

SEQ ID NO: 10672 - DNA, 15 bp, synthetic construct
  source 1..15: mol_type = other DNA
tctttgctggtcagt

SEQ ID NO: 10673 - DNA, 15 bp, synthetic construct
  source 1..15: mol_type = other DNA
ttgaaaaggtgggtg

SEQ ID NO: 10674 - DNA, 15 bp, synthetic construct
  source 1..15: mol_type = other DNA
tacatccatggctaa

SEQ ID NO: 10675 - DNA, 15 bp, synthetic construct
  source 1..15: mol_type = other DNA
taagatgacacatgc

SEQ ID NO: 10676 - DNA, 15 bp, synthetic construct
  source 1..15: mol_type = other DNA
ttgatctcctttaag

SEQ ID NO: 10677 - DNA, 15 bp, synthetic construct
  source 1..15: mol_type = other DNA
attgtcagaaaggta

SEQ ID NO: 10678 - DNA, 15 bp, synthetic construct
  source 1..15: mol_type = other DNA
gtcgaatggccactc

SEQ ID NO: 10679 - DNA, 15 bp, synthetic construct
  source 1..15: mol_type = other DNA
gtgaatgtctcggga

SEQ ID NO: 10680 - DNA, 15 bp, synthetic construct
  source 1..15: mol_type = other DNA
gaaccagtgcatacc

SEQ ID NO: 10681 - DNA, 15 bp, synthetic construct
  source 1..15: mol_type = other DNA
gtaagtctgcaaaat

SEQ ID NO: 10682 - DNA, 15 bp, synthetic construct
  source 1..15: mol_type = other DNA
cccaagtgtgatggt

SEQ ID NO: 10683 - DNA, 15 bp, synthetic construct
  source 1..15: mol_type = other DNA
ttgacaaagccagtg

SEQ ID NO: 10684 - DNA, 15 bp, synthetic construct
  source 1..15: mol_type = other DNA
tgcatctcacactag

SEQ ID NO: 10685 - DNA, 15 bp, synthetic construct
  source 1..15: mol_type = other DNA
tcagggaattccgag

SEQ ID NO: 10686 - DNA, 15 bp, synthetic construct
  source 1..15: mol_type = other DNA
tagagaacaccctct

SEQ ID NO: 10687 - DNA, 15 bp, synthetic construct
  source 1..15: mol_type = other DNA
atcctaaccgccact

SEQ ID NO: 10688 - DNA, 15 bp, synthetic construct
  source 1..15: mol_type = other DNA
aattgtgtgccaaag

SEQ ID NO: 10689 - DNA, 15 bp, synthetic construct
  source 1..15: mol_type = other DNA
accgtggagtcatat

SEQ ID NO: 10690 - DNA, 15 bp, synthetic construct
  source 1..15: mol_type = other DNA
gtgctaatgtgtctt

SEQ ID NO: 10691 - DNA, 15 bp, synthetic construct
  source 1..15: mol_type = other DNA
attgtcaggatccac

SEQ ID NO: 10692 - DNA, 15 bp, synthetic construct
  source 1..15: mol_type = other DNA
cccaccgctgatttg

SEQ ID NO: 10693 - DNA, 15 bp, synthetic construct
  source 1..15: mol_type = other DNA
ctggataagccagaa

SEQ ID NO: 10694 - DNA, 15 bp, synthetic construct
  source 1..15: mol_type = other DNA
ctgcttagttcccgg

SEQ ID NO: 10695 - DNA, 15 bp, synthetic construct
  source 1..15: mol_type = other DNA
ggtcactgctatcag

SEQ ID NO: 10696 - DNA, 15 bp, synthetic construct
  source 1..15: mol_type = other DNA
ggattgaagggagaa

SEQ ID NO: 10697 - DNA, 15 bp, synthetic construct
  source 1..15: mol_type = other DNA
gtaaccatccttata

SEQ ID NO: 10698 - DNA, 15 bp, synthetic construct
  source 1..15: mol_type = other DNA
ggagcgctcttcagg

SEQ ID NO: 10699 - DNA, 15 bp, synthetic construct
  source 1..15: mol_type = other DNA
gaggtcacgctctgt

SEQ ID NO: 10700 - DNA, 15 bp, synthetic construct
  source 1..15: mol_type = other DNA
cagcagcataagtgg

SEQ ID NO: 10701 - DNA, 15 bp, synthetic construct
  source 1..15: mol_type = other DNA
cagtcaaacgtgaag

SEQ ID NO: 10702 - DNA, 15 bp, synthetic construct
  source 1..15: mol_type = other DNA
ctcgtccttaggaag

SEQ ID NO: 10703 - DNA, 15 bp, synthetic construct
  source 1..15: mol_type = other DNA
gtccacgttgccgaa

SEQ ID NO: 10704 - DNA, 15 bp, synthetic construct
  source 1..15: mol_type = other DNA
gggctgtttctcaga

SEQ ID NO: 10705 - DNA, 15 bp, synthetic construct
  source 1..15: mol_type = other DNA
cctcgttaggacgga

SEQ ID NO: 10706 - DNA, 15 bp, synthetic construct
  source 1..15: mol_type = other DNA
aagggcagaatgtac

SEQ ID NO: 10707 - DNA, 15 bp, synthetic construct
  source 1..15: mol_type = other DNA
cgtctcaaggtcatg

SEQ ID NO: 10708 - DNA, 15 bp, synthetic construct
  source 1..15: mol_type = other DNA
cctcctcgatgaagg

SEQ ID NO: 10709 - DNA, 15 bp, synthetic construct
  source 1..15: mol_type = other DNA
atgcagagttaatag

SEQ ID NO: 10710 - DNA, 15 bp, synthetic construct
  source 1..15: mol_type = other DNA
gggactactgagata

SEQ ID NO: 10711 - DNA, 15 bp, synthetic construct
  source 1..15: mol_type = other DNA
ggcttggagatccag

SEQ ID NO: 10712 - DNA, 15 bp, synthetic construct
  source 1..15: mol_type = other DNA
cttcagaaagggagg

SEQ ID NO: 10713 - DNA, 15 bp, synthetic construct
  source 1..15: mol_type = other DNA
cagtgtgggtgcaac

SEQ ID NO: 10714 - DNA, 15 bp, synthetic construct
  source 1..15: mol_type = other DNA
catgttggacattac

SEQ ID NO: 10715 - DNA, 15 bp, synthetic construct
  source 1..15: mol_type = other DNA
caccaagcaggtaac

SEQ ID NO: 10716 - DNA, 15 bp, synthetic construct
  source 1..15: mol_type = other DNA
agaacaggaaaatag

SEQ ID NO: 10717 - DNA, 15 bp, synthetic construct
  source 1..15: mol_type = other DNA
agaaaacaggagtca

SEQ ID NO: 10718 - DNA, 15 bp, synthetic construct
  source 1..15: mol_type = other DNA
atgggcatgtcagac

SEQ ID NO: 10719 - DNA, 15 bp, synthetic construct
  source 1..15: mol_type = other DNA
tggcatccacaccag

SEQ ID NO: 10720 - DNA, 15 bp, synthetic construct
  source 1..15: mol_type = other DNA
ctgagatgggtcagg

SEQ ID NO: 10721 - DNA, 15 bp, synthetic construct
  source 1..15: mol_type = other DNA
gcctaggaggcaaaa

SEQ ID NO: 10722 - DNA, 15 bp, synthetic construct
  source 1..15: mol_type = other DNA
atcagattcatcaga

SEQ ID NO: 10723 - DNA, 15 bp, synthetic construct
  source 1..15: mol_type = other DNA
tcagtccataaacca

SEQ ID NO: 10724 - DNA, 15 bp, synthetic construct
  source 1..15: mol_type = other DNA
tgacaaccaagccct

SEQ ID NO: 10725 - DNA, 15 bp, synthetic construct
  source 1..15: mol_type = other DNA
atcagagtcgttcga

SEQ ID NO: 10726 - DNA, 15 bp, synthetic construct
  source 1..15: mol_type = other DNA
cagcgatggctccga

SEQ ID NO: 10727 - DNA, 15 bp, synthetic construct
  source 1..15: mol_type = other DNA
gatcttcaggttcca

SEQ ID NO: 10728 - DNA, 15 bp, synthetic construct
  source 1..15: mol_type = other DNA
agccgggtttgagtt

SEQ ID NO: 10729 - DNA, 15 bp, synthetic construct
  source 1..15: mol_type = other DNA
aagaaattcttgcag

SEQ ID NO: 10730 - DNA, 15 bp, synthetic construct
  source 1..15: mol_type = other DNA
ggatcagaggtctga

SEQ ID NO: 10731 - DNA, 15 bp, synthetic construct
  source 1..15: mol_type = other DNA
gggtctcgctgaaga

SEQ ID NO: 10732 - DNA, 15 bp, synthetic construct
  source 1..15: mol_type = other DNA
tctgttctgcaaggt

SEQ ID NO: 10733 - DNA, 15 bp, synthetic construct
  source 1..15: mol_type = other DNA
accttgtccttcaca

SEQ ID NO: 10734 - DNA, 15 bp, synthetic construct
  source 1..15: mol_type = other DNA
gggcattctgggtaa

SEQ ID NO: 10735 - DNA, 15 bp, synthetic construct
  source 1..15: mol_type = other DNA
aaatctctgggcgtt

SEQ ID NO: 10736 - DNA, 15 bp, synthetic construct
  source 1..15: mol_type = other DNA
gatcatagacatctg

SEQ ID NO: 10737 - DNA, 15 bp, synthetic construct
  source 1..15: mol_type = other DNA
cgaacttgctgcaga

SEQ ID NO: 10738 - DNA, 15 bp, synthetic construct
  source 1..15: mol_type = other DNA
gtggcaaatgaaaca

SEQ ID NO: 10739 - DNA, 15 bp, synthetic construct
  source 1..15: mol_type = other DNA
ttcttgtttctgatc

SEQ ID NO: 10740 - DNA, 15 bp, synthetic construct
  source 1..15: mol_type = other DNA
tttctaaccactgtg

SEQ ID NO: 10741 - DNA, 15 bp, synthetic construct
  source 1..15: mol_type = other DNA
tttgagtcaagctgc

SEQ ID NO: 10742 - DNA, 15 bp, synthetic construct
  source 1..15: mol_type = other DNA
ctttctgtttgtcta

SEQ ID NO: 10743 - DNA, 15 bp, synthetic construct
  source 1..15: mol_type = other DNA
cacagtgaactggac

SEQ ID NO: 10744 - DNA, 15 bp, synthetic construct
  source 1..15: mol_type = other DNA
aaagcgactatattg

SEQ ID NO: 10745 - DNA, 15 bp, synthetic construct
  source 1..15: mol_type = other DNA
ctgtcatcataaagc

SEQ ID NO: 10746 - DNA, 15 bp, synthetic construct
  source 1..15: mol_type = other DNA
aagactgaaggtgcg

SEQ ID NO: 10747 - DNA, 15 bp, synthetic construct
  source 1..15: mol_type = other DNA
gggtcatgttcgtag

SEQ ID NO: 10748 - DNA, 15 bp, synthetic construct
  source 1..15: mol_type = other DNA
gggattgttggtcag

SEQ ID NO: 10749 - DNA, 15 bp, synthetic construct
  source 1..15: mol_type = other DNA
agtgaaagtgacgcc

SEQ ID NO: 10750 - DNA, 15 bp, synthetic construct
  source 1..15: mol_type = other DNA
ggaagcggctatact

SEQ ID NO: 10751 - DNA, 15 bp, synthetic construct
  source 1..15: mol_type = other DNA
actctcttccggaca

SEQ ID NO: 10752 - DNA, 15 bp, synthetic construct
  source 1..15: mol_type = other DNA
ttgtgtatggttcca

SEQ ID NO: 10753 - DNA, 15 bp, synthetic construct
  source 1..15: mol_type = other DNA
atctggtccagcgca

SEQ ID NO: 10754 - DNA, 15 bp, synthetic construct
  source 1..15: mol_type = other DNA
gccttggtgatacac

SEQ ID NO: 10755 - DNA, 15 bp, synthetic construct
  source 1..15: mol_type = other DNA
agagttttctgcacg

SEQ ID NO: 10756 - DNA, 15 bp, synthetic construct
  source 1..15: mol_type = other DNA
cgggtctgaagttga

SEQ ID NO: 10757 - DNA, 15 bp, synthetic construct
  source 1..15: mol_type = other DNA
ctttgtaggaaactt

SEQ ID NO: 10758 - DNA, 15 bp, synthetic construct
  source 1..15: mol_type = other DNA
ttcgttccaaagggc

SEQ ID NO: 10759 - DNA, 15 bp, synthetic construct
  source 1..15: mol_type = other DNA
agttttctagccgat

SEQ ID NO: 10760 - DNA, 15 bp, synthetic construct
  source 1..15: mol_type = other DNA
agtttctaaacagct

SEQ ID NO: 10761 - DNA, 15 bp, synthetic construct
  source 1..15: mol_type = other DNA
gcagctccggaaacc

SEQ ID NO: 10762 - DNA, 15 bp, synthetic construct
  source 1..15: mol_type = other DNA
ctttagtagtgaact

SEQ ID NO: 10763 - DNA, 15 bp, synthetic construct
  source 1..15: mol_type = other DNA
ttcactgaatcttag

SEQ ID NO: 10764 - DNA, 15 bp, synthetic construct
  source 1..15: mol_type = other DNA
gtagctgattccatt

SEQ ID NO: 10765 - DNA, 15 bp, synthetic construct
  source 1..15: mol_type = other DNA
gttgaaatcaaagtc

SEQ ID NO: 10766 - DNA, 15 bp, synthetic construct
  source 1..15: mol_type = other DNA
gtttgtgcccagaat

SEQ ID NO: 10767 - DNA, 15 bp, synthetic construct
  source 1..15: mol_type = other DNA
ttggcatctgacaga

SEQ ID NO: 10768 - DNA, 15 bp, synthetic construct
  source 1..15: mol_type = other DNA
attttgtccttcagc

SEQ ID NO: 10769 - DNA, 15 bp, synthetic construct
  source 1..15: mol_type = other DNA
agcaccttcaccatt

SEQ ID NO: 10770 - DNA, 15 bp, synthetic construct
  source 1..15: mol_type = other DNA
tggtcactgactggt

SEQ ID NO: 10771 - DNA, 15 bp, synthetic construct
  source 1..15: mol_type = other DNA
caagagtttctctgc

SEQ ID NO: 10772 - DNA, 15 bp, synthetic construct
  source 1..15: mol_type = other DNA
gggccaacagatgcc

SEQ ID NO: 10773 - DNA, 15 bp, synthetic construct
  source 1..15: mol_type = other DNA
tcgttggttgacacg

SEQ ID NO: 10774 - DNA, 15 bp, synthetic construct
  source 1..15: mol_type = other DNA
agaccacgaccaacg

SEQ ID NO: 10775 - DNA, 15 bp, synthetic construct
  source 1..15: mol_type = other DNA
gcgatttgctgccgc

SEQ ID NO: 10776 - DNA, 15 bp, synthetic construct
  source 1..15: mol_type = other DNA
cataacctttgtcac

SEQ ID NO: 10777 - DNA, 15 bp, synthetic construct
  source 1..15: mol_type = other DNA
gccatcatcagtagg

SEQ ID NO: 10778 - DNA, 15 bp, synthetic construct
  source 1..15: mol_type = other DNA
tgcattggaatggga

SEQ ID NO: 10779 - DNA, 15 bp, synthetic construct
  source 1..15: mol_type = other DNA
actgtttttaatggc

SEQ ID NO: 10780 - DNA, 15 bp, synthetic construct
  source 1..15: mol_type = other DNA
atggtgttcattaac

SEQ ID NO: 10781 - DNA, 15 bp, synthetic construct
  source 1..15: mol_type = other DNA
ggttggcatacatgg

SEQ ID NO: 10782 - DNA, 15 bp, synthetic construct
  source 1..15: mol_type = other DNA
gagtgtgaagagagc

SEQ ID NO: 10783 - DNA, 15 bp, synthetic construct
  source 1..15: mol_type = other DNA
cagtcacaacactcc

SEQ ID NO: 10784 - DNA, 15 bp, synthetic construct
  source 1..15: mol_type = other DNA
ctgaattagggtttt

SEQ ID NO: 10785 - DNA, 15 bp, synthetic construct
  source 1..15: mol_type = other DNA
aagaactttgtaagg

SEQ ID NO: 10786 - DNA, 15 bp, synthetic construct
  source 1..15: mol_type = other DNA
aggcattttatcctt

SEQ ID NO: 10787 - DNA, 15 bp, synthetic construct
  source 1..15: mol_type = other DNA
cagccataataactt

SEQ ID NO: 10788 - DNA, 15 bp, synthetic construct
  source 1..15: mol_type = other DNA
catgggaagaaggtc

SEQ ID NO: 10789 - DNA, 15 bp, synthetic construct
  source 1..15: mol_type = other DNA
caaatgtcgaaattc

SEQ ID NO: 10790 - DNA, 15 bp, synthetic construct
  source 1..15: mol_type = other DNA
agatccaatattgct

SEQ ID NO: 10791 - DNA, 15 bp, synthetic construct
  source 1..15: mol_type = other DNA
tatggaatgaagttc

SEQ ID NO: 10792 - DNA, 15 bp, synthetic construct
  source 1..15: mol_type = other DNA
ggtagattgctcctc

SEQ ID NO: 10793 - DNA, 15 bp, synthetic construct
  source 1..15: mol_type = other DNA
ttcctgcagtgtcaa

SEQ ID NO: 10794 - DNA, 15 bp, synthetic construct
  source 1..15: mol_type = other DNA
ggcagtgctcaagtc

SEQ ID NO: 10795 - DNA, 15 bp, synthetic construct
  source 1..15: mol_type = other DNA
cctgtcattcagcag

SEQ ID NO: 10796 - DNA, 15 bp, synthetic construct
  source 1..15: mol_type = other DNA
cactggcagtttatt

SEQ ID NO: 10797 - DNA, 15 bp, synthetic construct
  source 1..15: mol_type = other DNA
ccgttggcgatgcat

SEQ ID NO: 10798 - DNA, 15 bp, synthetic construct
  source 1..15: mol_type = other DNA
tggatctggatacac

SEQ ID NO: 10799 - DNA, 15 bp, synthetic construct
  source 1..15: mol_type = other DNA
caatctgatgtcagc

SEQ ID NO: 10800 - DNA, 15 bp, synthetic construct
  source 1..15: mol_type = other DNA
agcgctgtacaagaa

SEQ ID NO: 10801 - DNA, 15 bp, synthetic construct
  source 1..15: mol_type = other DNA
ctcatgggttgcaga

SEQ ID NO: 10802 - DNA, 15 bp, synthetic construct
  source 1..15: mol_type = other DNA
tcccatctgtgtcac

SEQ ID NO: 10803 - DNA, 15 bp, synthetic construct
  source 1..15: mol_type = other DNA
tccacatcttcaaat

SEQ ID NO: 10804 - DNA, 15 bp, synthetic construct
  source 1..15: mol_type = other DNA
agcactgctgagttt

SEQ ID NO: 10805 - DNA, 15 bp, synthetic construct
  source 1..15: mol_type = other DNA
agatttcaggcaatc

SEQ ID NO: 10806 - DNA, 15 bp, synthetic construct
  source 1..15: mol_type = other DNA
gcacctcagcaatca

SEQ ID NO: 10807 - DNA, 15 bp, synthetic construct
  source 1..15: mol_type = other DNA
gctgcttcttgcacc

SEQ ID NO: 10808 - DNA, 15 bp, synthetic construct
  source 1..15: mol_type = other DNA
acaaaggagctccac

SEQ ID NO: 10809 - DNA, 15 bp, synthetic construct
  source 1..15: mol_type = other DNA
acctgtagagcactg

SEQ ID NO: 10810 - DNA, 15 bp, synthetic construct
  source 1..15: mol_type = other DNA
gtcgtttgactttgg

SEQ ID NO: 10811 - DNA, 15 bp, synthetic construct
  source 1..15: mol_type = other DNA
ggtcacatggatttt

SEQ ID NO: 10812 - DNA, 15 bp, synthetic construct
  source 1..15: mol_type = other DNA
atgctgcacacattc

SEQ ID NO: 10813 - DNA, 15 bp, synthetic construct
  source 1..15: mol_type = other DNA
gagcgctttgaagca

SEQ ID NO: 10814 - DNA, 15 bp, synthetic construct
  source 1..15: mol_type = other DNA
gagatagttattcca

SEQ ID NO: 10815 - DNA, 15 bp, synthetic construct
  source 1..15: mol_type = other DNA
ggatccctatcactc

SEQ ID NO: 10816 - DNA, 15 bp, synthetic construct
  source 1..15: mol_type = other DNA
ccgaatggcgaggaa

SEQ ID NO: 10817 - DNA, 15 bp, synthetic construct
  source 1..15: mol_type = other DNA
ctgagttttgagccg

SEQ ID NO: 10818 - DNA, 15 bp, synthetic construct
  source 1..15: mol_type = other DNA
gaatactcatgaact

SEQ ID NO: 10819 - DNA, 15 bp, synthetic construct
  source 1..15: mol_type = other DNA
tcaagcaccaatagt

SEQ ID NO: 10820 - DNA, 15 bp, synthetic construct
  source 1..15: mol_type = other DNA
gggatctccacggta

SEQ ID NO: 10821 - DNA, 15 bp, synthetic construct
  source 1..15: mol_type = other DNA
gaggtcaacagtctg

SEQ ID NO: 10822 - DNA, 15 bp, synthetic construct
  source 1..15: mol_type = other DNA
cgattttggactgca

SEQ ID NO: 10823 - DNA, 15 bp, synthetic construct
  source 1..15: mol_type = other DNA
atccattcccaagat

SEQ ID NO: 10824 - DNA, 15 bp, synthetic construct
  source 1..15: mol_type = other DNA
caagggcgacgaagc

SEQ ID NO: 10825 - DNA, 15 bp, synthetic construct
  source 1..15: mol_type = other DNA
ttccaaacaattctg

SEQ ID NO: 10826 - DNA, 15 bp, synthetic construct
  source 1..15: mol_type = other DNA
ccaggataagtacac

SEQ ID NO: 10827 - DNA, 15 bp, synthetic construct
  source 1..15: mol_type = other DNA
aatgtgacaaggttc

SEQ ID NO: 10828 - DNA, 15 bp, synthetic construct
  source 1..15: mol_type = other DNA
acttcttccaaatac

SEQ ID NO: 10829 - DNA, 15 bp, synthetic construct
  source 1..15: mol_type = other DNA
caaagcttcgaactg

SEQ ID NO: 10830 - DNA, 15 bp, synthetic construct
  source 1..15: mol_type = other DNA
cgttttcgctcttgg

SEQ ID NO: 10831 - DNA, 15 bp, synthetic construct
  source 1..15: mol_type = other DNA
atctgggcggtttgg

SEQ ID NO: 10832 - DNA, 15 bp, synthetic construct
  source 1..15: mol_type = other DNA
ctctgctaacaaccc

SEQ ID NO: 10833 - DNA, 15 bp, synthetic construct
  source 1..15: mol_type = other DNA
aactgacaacgaagg

SEQ ID NO: 10834 - DNA, 15 bp, synthetic construct
  source 1..15: mol_type = other DNA
gatgaaactatgggc

SEQ ID NO: 10835 - DNA, 15 bp, synthetic construct
  source 1..15: mol_type = other DNA
attctgagtacttct

SEQ ID NO: 10836 - DNA, 15 bp, synthetic construct
  source 1..15: mol_type = other DNA
ttgttatagatcccg

SEQ ID NO: 10837 - DNA, 15 bp, synthetic construct
  source 1..15: mol_type = other DNA
acagggtgtttatgg

SEQ ID NO: 10838 - DNA, 15 bp, synthetic construct
  source 1..15: mol_type = other DNA
agaatcactcagggt

SEQ ID NO: 10839 - DNA, 15 bp, synthetic construct
  source 1..15: mol_type = other DNA
ggaactggacaaggc

SEQ ID NO: 10840 - DNA, 15 bp, synthetic construct
  source 1..15: mol_type = other DNA
ccaggtaccacagaa

SEQ ID NO: 10841 - DNA, 15 bp, synthetic construct
  source 1..15: mol_type = other DNA
cggcccgtaaagaat

SEQ ID NO: 10842 - DNA, 15 bp, synthetic construct
  source 1..15: mol_type = other DNA
ccagtcggcgagaag

SEQ ID NO: 10843 - DNA, 15 bp, synthetic construct
  source 1..15: mol_type = other DNA
gctctcggaaagtcc

SEQ ID NO: 10844 - DNA, 15 bp, synthetic construct
  source 1..15: mol_type = other DNA
gtctggttctgttgg

SEQ ID NO: 10845 - DNA, 15 bp, synthetic construct
  source 1..15: mol_type = other DNA
tggctggactttgcc

SEQ ID NO: 10846 - DNA, 15 bp, synthetic construct
  source 1..15: mol_type = other DNA
tgaaggtatcggctg

SEQ ID NO: 10847 - DNA, 15 bp, synthetic construct
  source 1..15: mol_type = other DNA
ggtccaggtactcaa

SEQ ID NO: 10848 - DNA, 15 bp, synthetic construct
  source 1..15: mol_type = other DNA
aggattcccactttc

SEQ ID NO: 10849 - DNA, 15 bp, synthetic construct
  source 1..15: mol_type = other DNA
ctccttccagaaaga

SEQ ID NO: 10850 - DNA, 15 bp, synthetic construct
  source 1..15: mol_type = other DNA
ctgcacatagctccc

SEQ ID NO: 10851 - DNA, 15 bp, synthetic construct
  source 1..15: mol_type = other DNA
cataagcaatgttgt

SEQ ID NO: 10852 - DNA, 15 bp, synthetic construct
  source 1..15: mol_type = other DNA
gggcaatggccagac

SEQ ID NO: 10853 - DNA, 15 bp, synthetic construct
  source 1..15: mol_type = other DNA
atgcaaaggagacgt

SEQ ID NO: 10854 - DNA, 15 bp, synthetic construct
  source 1..15: mol_type = other DNA
tcaatcacacgacca

SEQ ID NO: 10855 - DNA, 15 bp, synthetic construct
  source 1..15: mol_type = other DNA
agggtggtatccgag

SEQ ID NO: 10856 - DNA, 15 bp, synthetic construct
  source 1..15: mol_type = other DNA
agcactgtgcgatcc

SEQ ID NO: 10857 - DNA, 15 bp, synthetic construct
  source 1..15: mol_type = other DNA
acttgaaaatcaggg

SEQ ID NO: 10858 - DNA, 15 bp, synthetic construct
  source 1..15: mol_type = other DNA
gtgttgtacaccttc

SEQ ID NO: 10859 - DNA, 15 bp, synthetic construct
  source 1..15: mol_type = other DNA
agaggatagtaggaa

SEQ ID NO: 10860 - DNA, 15 bp, synthetic construct
  source 1..15: mol_type = other DNA
gcactgcacatctag

SEQ ID NO: 10861 - DNA, 15 bp, synthetic construct
  source 1..15: mol_type = other DNA
gcgatatgctgagca

SEQ ID NO: 10862 - DNA, 15 bp, synthetic construct
  source 1..15: mol_type = other DNA
tagcagtgttcatac

SEQ ID NO: 10863 - DNA, 15 bp, synthetic construct
  source 1..15: mol_type = other DNA
ctcaccaggacgtag

SEQ ID NO: 10864 - DNA, 15 bp, synthetic construct
  source 1..15: mol_type = other DNA
cttcgcaagagcaca

SEQ ID NO: 10865 - DNA, 15 bp, synthetic construct
  source 1..15: mol_type = other DNA
tgattagctgcgtga

SEQ ID NO: 10866 - DNA, 15 bp, synthetic construct
  source 1..15: mol_type = other DNA
cgccatcaccttatc

SEQ ID NO: 10867 - DNA, 15 bp, synthetic construct
  source 1..15: mol_type = other DNA
gcgaacggtctgcag

SEQ ID NO: 10868 - DNA, 15 bp, synthetic construct
  source 1..15: mol_type = other DNA
caaggaagaagaagg

SEQ ID NO: 10869 - DNA, 15 bp, synthetic construct
  source 1..15: mol_type = other DNA
tctggagcaaaccag

SEQ ID NO: 10870 - DNA, 15 bp, synthetic construct
  source 1..15: mol_type = other DNA
atccgcaagttgatt

SEQ ID NO: 10871 - DNA, 15 bp, synthetic construct
  source 1..15: mol_type = other DNA
ggtccatgtaggaga

SEQ ID NO: 10872 - DNA, 15 bp, synthetic construct
  source 1..15: mol_type = other DNA
ggcctctttatagcg

SEQ ID NO: 10873 - DNA, 15 bp, synthetic construct
  source 1..15: mol_type = other DNA
aatggtagagaaacc

SEQ ID NO: 10874 - DNA, 15 bp, synthetic construct
  source 1..15: mol_type = other DNA
tcccaaatgaaactt

SEQ ID NO: 10875 - DNA, 15 bp, synthetic construct
  source 1..15: mol_type = other DNA
aagaccacgtccaca

SEQ ID NO: 10876 - DNA, 15 bp, synthetic construct
  source 1..15: mol_type = other DNA
tgccgctctggtacc

SEQ ID NO: 10877 - DNA, 15 bp, synthetic construct
  source 1..15: mol_type = other DNA
agcatctggtgaacc

SEQ ID NO: 10878 - DNA, 15 bp, synthetic construct
  source 1..15: mol_type = other DNA
gcccggccacagtaa

SEQ ID NO: 10879 - DNA, 15 bp, synthetic construct
  source 1..15: mol_type = other DNA
acaggtggttgttga

SEQ ID NO: 10880 - DNA, 15 bp, synthetic construct
  source 1..15: mol_type = other DNA
gtacttatggaggga

SEQ ID NO: 10881 - DNA, 15 bp, synthetic construct
  source 1..15: mol_type = other DNA
caccactctcagtac

SEQ ID NO: 10882 - DNA, 15 bp, synthetic construct
  source 1..15: mol_type = other DNA
gactcaaagttctcc

SEQ ID NO: 10883 - DNA, 15 bp, synthetic construct
  source 1..15: mol_type = other DNA
aagtaaagatatgcg

SEQ ID NO: 10884 - DNA, 15 bp, synthetic construct
  source 1..15: mol_type = other DNA
gctcgaaactcagcc

SEQ ID NO: 10885 - DNA, 15 bp, synthetic construct
  source 1..15: mol_type = other DNA
cagctgtccaaagtc

SEQ ID NO: 10886 - DNA, 15 bp, synthetic construct
  source 1..15: mol_type = other DNA
acattgttggacgcc

SEQ ID NO: 10887 - DNA, 15 bp, synthetic construct
  source 1..15: mol_type = other DNA
ccacccactagatgc

SEQ ID NO: 10888 - DNA, 15 bp, synthetic construct
  source 1..15: mol_type = other DNA
ctttcatcatgtcat

SEQ ID NO: 10889 - DNA, 15 bp, synthetic construct
  source 1..15: mol_type = other DNA
cccttttctctgatc

SEQ ID NO: 10890 - DNA, 15 bp, synthetic construct
  source 1..15: mol_type = other DNA
tctccgtcgttcacc

SEQ ID NO: 10891 - DNA, 15 bp, synthetic construct
  source 1..15: mol_type = other DNA
tctctgtctggtgct

SEQ ID NO: 10892 - DNA, 15 bp, synthetic construct
  source 1..15: mol_type = other DNA
ggatcagggattaac

SEQ ID NO: 10893 - DNA, 15 bp, synthetic construct
  source 1..15: mol_type = other DNA
gagtagtgatctccc

SEQ ID NO: 10894 - DNA, 15 bp, synthetic construct
  source 1..15: mol_type = other DNA
tccgtttcccaaatt

SEQ ID NO: 10895 - DNA, 15 bp, synthetic construct
  source 1..15: mol_type = other DNA
caccaggtaaacgac

SEQ ID NO: 10896 - DNA, 15 bp, synthetic construct
  source 1..15: mol_type = other DNA
gggctgatggttata

SEQ ID NO: 10897 - DNA, 15 bp, synthetic construct
  source 1..15: mol_type = other DNA
tgggaacaggatact

SEQ ID NO: 10898 - DNA, 15 bp, synthetic construct
  source 1..15: mol_type = other DNA
cccgacgcaagagca

SEQ ID NO: 10899 - DNA, 15 bp, synthetic construct
  source 1..15: mol_type = other DNA
ctccaccagaatcta

SEQ ID NO: 10900 - DNA, 15 bp, synthetic construct
  source 1..15: mol_type = other DNA
cagctgcgataaagg

SEQ ID NO: 10901 - DNA, 15 bp, synthetic construct
  source 1..15: mol_type = other DNA
gtgtttaccggcagg

SEQ ID NO: 10902 - DNA, 15 bp, synthetic construct
  source 1..15: mol_type = other DNA
tgcttctcgtccaaa

SEQ ID NO: 10903 - DNA, 15 bp, synthetic construct
  source 1..15: mol_type = other DNA
gctcaggtgaatcgg

SEQ ID NO: 10904 - DNA, 15 bp, synthetic construct
  source 1..15: mol_type = other DNA
tgggtgtgcaacatg

SEQ ID NO: 10905 - DNA, 15 bp, synthetic construct
  source 1..15: mol_type = other DNA
ctgagaaaagccgag

SEQ ID NO: 10906 - DNA, 15 bp, synthetic construct
  source 1..15: mol_type = other DNA
gggccgaccctttat

SEQ ID NO: 10907 - DNA, 15 bp, synthetic construct
  source 1..15: mol_type = other DNA
cagcgtttgcaggcg

SEQ ID NO: 10908 - DNA, 15 bp, synthetic construct
  source 1..15: mol_type = other DNA
tgtaacacccaggtg

SEQ ID NO: 10909 - DNA, 15 bp, synthetic construct
  source 1..15: mol_type = other DNA
ctctatcccttttcc

SEQ ID NO: 10910 - DNA, 15 bp, synthetic construct
  source 1..15: mol_type = other DNA
tgatgtggtacacta

SEQ ID NO: 10911 - DNA, 15 bp, synthetic construct
  source 1..15: mol_type = other DNA
ttacatgcaggcgta

SEQ ID NO: 10912 - DNA, 15 bp, synthetic construct
  source 1..15: mol_type = other DNA
cccgaagtggtaagg

SEQ ID NO: 10913 - DNA, 15 bp, synthetic construct
  source 1..15: mol_type = other DNA
ccttgagctgcacgt

SEQ ID NO: 10914 - DNA, 15 bp, synthetic construct
  source 1..15: mol_type = other DNA
ggatcggtatcgtcc

SEQ ID NO: 10915 - DNA, 15 bp, synthetic construct
  source 1..15: mol_type = other DNA
agacacaggcatagt

SEQ ID NO: 10916 - DNA, 15 bp, synthetic construct
  source 1..15: mol_type = other DNA
atgaaagtgccagct

SEQ ID NO: 10917 - DNA, 15 bp, synthetic construct
  source 1..15: mol_type = other DNA
ttccgcacgaagtta

SEQ ID NO: 10918 - DNA, 15 bp, synthetic construct
  source 1..15: mol_type = other DNA
catgataggcagcag

SEQ ID NO: 10919 - DNA, 15 bp, synthetic construct
  source 1..15: mol_type = other DNA
agctcaccatacatc

SEQ ID NO: 10920 - DNA, 15 bp, synthetic construct
  source 1..15: mol_type = other DNA
agtgctaaggcgagc

SEQ ID NO: 10921 - DNA, 15 bp, synthetic construct
  source 1..15: mol_type = other DNA
tgccaaatggaatcc

SEQ ID NO: 10922 - DNA, 15 bp, synthetic construct
  source 1..15: mol_type = other DNA
ggcatccaccatact

SEQ ID NO: 10923 - DNA, 15 bp, synthetic construct
  source 1..15: mol_type = other DNA
ttgattgcggagtca

SEQ ID NO: 10924 - DNA, 15 bp, synthetic construct
  source 1..15: mol_type = other DNA
tcttgactgatagaa

SEQ ID NO: 10925 - DNA, 15 bp, synthetic construct
  source 1..15: mol_type = other DNA
agctgtattccttaa

SEQ ID NO: 10926 - DNA, 15 bp, synthetic construct
  source 1..15: mol_type = other DNA
caagattaagcagca

SEQ ID NO: 10927 - DNA, 15 bp, synthetic construct
  source 1..15: mol_type = other DNA
ccagcctaaagtcgc

SEQ ID NO: 10928 - DNA, 15 bp, synthetic construct
  source 1..15: mol_type = other DNA
gttaagtaccaacta

SEQ ID NO: 10929 - DNA, 15 bp, synthetic construct
  source 1..15: mol_type = other DNA
ggactgatttgatgt

SEQ ID NO: 10930 - DNA, 15 bp, synthetic construct
  source 1..15: mol_type = other DNA
gaggttgttgaggtt

SEQ ID NO: 10931 - DNA, 15 bp, synthetic construct
  source 1..15: mol_type = other DNA
tgattctgtagctgg

SEQ ID NO: 10932 - DNA, 15 bp, synthetic construct
  source 1..15: mol_type = other DNA
ctgatcttactagca

SEQ ID NO: 10933 - DNA, 15 bp, synthetic construct
  source 1..15: mol_type = other DNA
caaaaggagaaaaac

SEQ ID NO: 10934 - DNA, 15 bp, synthetic construct
  source 1..15: mol_type = other DNA
agctgggttccataa

SEQ ID NO: 10935 - DNA, 15 bp, synthetic construct
  source 1..15: mol_type = other DNA
acactacagaaactg

SEQ ID NO: 10936 - DNA, 15 bp, synthetic construct
  source 1..15: mol_type = other DNA
aagcagatcaagaaa

SEQ ID NO: 10937 - DNA, 15 bp, synthetic construct
  source 1..15: mol_type = other DNA
cttgagtaagtagtg

SEQ ID NO: 10938 - DNA, 15 bp, synthetic construct
  source 1..15: mol_type = other DNA
tagaatctgttctca

SEQ ID NO: 10939 - DNA, 15 bp, synthetic construct
  source 1..15: mol_type = other DNA
tcacaagggcctttg

SEQ ID NO: 10940 - DNA, 15 bp, synthetic construct
  source 1..15: mol_type = other DNA
tccaaatcaggcagg

SEQ ID NO: 10941 - DNA, 15 bp, synthetic construct
  source 1..15: mol_type = other DNA
taccacttcacctaa

SEQ ID NO: 10942 - DNA, 15 bp, synthetic construct
  source 1..15: mol_type = other DNA
ttccttccaggtatt

SEQ ID NO: 10943 - DNA, 15 bp, synthetic construct
  source 1..15: mol_type = other DNA
acttaaatgggcggc

SEQ ID NO: 10944 - DNA, 15 bp, synthetic construct
  source 1..15: mol_type = other DNA
agagtcggcttcaga

SEQ ID NO: 10945 - DNA, 15 bp, synthetic construct
  source 1..15: mol_type = other DNA
agcacatgaattttc

SEQ ID NO: 10946 - DNA, 15 bp, synthetic construct
  source 1..15: mol_type = other DNA
gcagtgggcgctaag

SEQ ID NO: 10947 - DNA, 15 bp, synthetic construct
  source 1..15: mol_type = other DNA
cgggttcaggtaccg

SEQ ID NO: 10948 - DNA, 15 bp, synthetic construct
  source 1..15: mol_type = other DNA
tcttcttcactatcc

SEQ ID NO: 10949 - DNA, 15 bp, synthetic construct
  source 1..15: mol_type = other DNA
tgtaaggcacttcaa

SEQ ID NO: 10950 - DNA, 15 bp, synthetic construct
  source 1..15: mol_type = other DNA
gaagcaggaaaggcc

SEQ ID NO: 10951 - DNA, 15 bp, synthetic construct
  source 1..15: mol_type = other DNA
gctgaggtatcgcca

SEQ ID NO: 10952 - DNA, 15 bp, synthetic construct
  source 1..15: mol_type = other DNA
agagagatccgtctc

SEQ ID NO: 10953 - DNA, 15 bp, synthetic construct
  source 1..15: mol_type = other DNA
ggcttgtttcctcac

SEQ ID NO: 10954 - DNA, 15 bp, synthetic construct
  source 1..15: mol_type = other DNA
actgccgcacaactc

SEQ ID NO: 10955 - DNA, 15 bp, synthetic construct
  source 1..15: mol_type = other DNA
cgttgatgtccactt

SEQ ID NO: 10956 - DNA, 15 bp, synthetic construct
  source 1..15: mol_type = other DNA
ctcagagtgttgcta

SEQ ID NO: 10957 - DNA, 15 bp, synthetic construct
  source 1..15: mol_type = other DNA
aaataacctagatgg

SEQ ID NO: 10958 - DNA, 15 bp, synthetic construct
  source 1..15: mol_type = other DNA
ctgtgtgtactctgc

SEQ ID NO: 10959 - DNA, 15 bp, synthetic construct
  source 1..15: mol_type = other DNA
acttgcaggagcgca

SEQ ID NO: 10960 - DNA, 15 bp, synthetic construct
  source 1..15: mol_type = other DNA
gctgtactgcgtgtc

SEQ ID NO: 10961 - DNA, 15 bp, synthetic construct
  source 1..15: mol_type = other DNA
cgatagtcttgcagg

SEQ ID NO: 10962 - DNA, 15 bp, synthetic construct
  source 1..15: mol_type = other DNA
gcccgggttatgctg

SEQ ID NO: 10963 - DNA, 15 bp, synthetic construct
  source 1..15: mol_type = other DNA
acttttaacttgagc

SEQ ID NO: 10964 - DNA, 15 bp, synthetic construct
  source 1..15: mol_type = other DNA
cgttgtgggtttcca

SEQ ID NO: 10965 - DNA, 15 bp, synthetic construct
  source 1..15: mol_type = other DNA
tgtgccttgatgccg

SEQ ID NO: 10966 - DNA, 15 bp, synthetic construct
  source 1..15: mol_type = other DNA
gtccactaggcaggc

SEQ ID NO: 10967 - DNA, 15 bp, synthetic construct
  source 1..15: mol_type = other DNA
ggacgtgggtagata

SEQ ID NO: 10968 - DNA, 15 bp, synthetic construct
  source 1..15: mol_type = other DNA
tggtattctcatggc

SEQ ID NO: 10969 - DNA, 15 bp, synthetic construct
  source 1..15: mol_type = other DNA
gctaatcgtgttcct

SEQ ID NO: 10970 - DNA, 15 bp, synthetic construct
  source 1..15: mol_type = other DNA
ggagcatctattcct

SEQ ID NO: 10971 - DNA, 15 bp, synthetic construct
  source 1..15: mol_type = other DNA
cagtgccgctcattt

SEQ ID NO: 10972 - DNA, 15 bp, synthetic construct
  source 1..15: mol_type = other DNA
ttagggtcattctga

SEQ ID NO: 10973 - DNA, 15 bp, synthetic construct
  source 1..15: mol_type = other DNA
ctcagcatggtcatt

SEQ ID NO: 10974 - DNA, 15 bp, synthetic construct
  source 1..15: mol_type = other DNA
gccagagcaagaaag

SEQ ID NO: 10975 - DNA, 15 bp, synthetic construct
  source 1..15: mol_type = other DNA
tgagacacaaatccc

SEQ ID NO: 10976 - DNA, 15 bp, synthetic construct
  source 1..15: mol_type = other DNA
attgtatgtgagcca

SEQ ID NO: 10977 - DNA, 15 bp, synthetic construct
  source 1..15: mol_type = other DNA
tgcatagcttagcgc

SEQ ID NO: 10978 - DNA, 15 bp, synthetic construct
  source 1..15: mol_type = other DNA
gagcacgtgcttctt

SEQ ID NO: 10979 - DNA, 15 bp, synthetic construct
  source 1..15: mol_type = other DNA
gagccggtagtctag

SEQ ID NO: 10980 - DNA, 15 bp, synthetic construct
  source 1..15: mol_type = other DNA
agttggttcgggagc

SEQ ID NO: 10981 - DNA, 15 bp, synthetic construct
  source 1..15: mol_type = other DNA
gtggacgtgggtaga

SEQ ID NO: 10982 - DNA, 15 bp, synthetic construct
  source 1..15: mol_type = other DNA
ccattcaccatagct

SEQ ID NO: 10983 - DNA, 15 bp, synthetic construct
  source 1..15: mol_type = other DNA
tcttcagggacatag

SEQ ID NO: 10984 - DNA, 15 bp, synthetic construct
  source 1..15: mol_type = other DNA
aaacaaccaacatct

SEQ ID NO: 10985 - DNA, 15 bp, synthetic construct
  source 1..15: mol_type = other DNA
ttgggaaaagccatt

SEQ ID NO: 10986 - DNA, 15 bp, synthetic construct
  source 1..15: mol_type = other DNA
cccacttctcctcaa

SEQ ID NO: 10987 - DNA, 15 bp, synthetic construct
  source 1..15: mol_type = other DNA
agaggaccttcatgt

SEQ ID NO: 10988 - DNA, 15 bp, synthetic construct
  source 1..15: mol_type = other DNA
atcgaggactcttgt

SEQ ID NO: 10989 - DNA, 15 bp, synthetic construct
  source 1..15: mol_type = other DNA
agggcgcaccactag

SEQ ID NO: 10990 - DNA, 15 bp, synthetic construct
  source 1..15: mol_type = other DNA
gcctgtgtatgtctc

SEQ ID NO: 10991 - DNA, 15 bp, synthetic construct
  source 1..15: mol_type = other DNA
gcaatggaatctgga

SEQ ID NO: 10992 - DNA, 15 bp, synthetic construct
  source 1..15: mol_type = other DNA
agaagcttatcattg

SEQ ID NO: 10993 - DNA, 15 bp, synthetic construct
  source 1..15: mol_type = other DNA
gggccttctttgtgg

SEQ ID NO: 10994 - DNA, 15 bp, synthetic construct
  source 1..15: mol_type = other DNA
caaacacagcaactt

SEQ ID NO: 10995 - DNA, 15 bp, synthetic construct
  source 1..15: mol_type = other DNA
agctttctaggacct

SEQ ID NO: 10996 - DNA, 15 bp, synthetic construct
  source 1..15: mol_type = other DNA
ccttagacaatatac

SEQ ID NO: 10997 - DNA, 15 bp, synthetic construct
  source 1..15: mol_type = other DNA
tgtatcgttcacggt

SEQ ID NO: 10998 - DNA, 15 bp, synthetic construct
  source 1..15: mol_type = other DNA
gggatgatacatgga

SEQ ID NO: 10999 - DNA, 15 bp, synthetic construct
  source 1..15: mol_type = other DNA
aaagtggctacgtgg

SEQ ID NO: 11000 - DNA, 15 bp, synthetic construct
  source 1..15: mol_type = other DNA
accaccacgatgact

SEQ ID NO: 11001 - DNA, 15 bp, synthetic construct
  source 1..15: mol_type = other DNA
ggtgcagtaggatca

SEQ ID NO: 11002 - DNA, 15 bp, synthetic construct
  source 1..15: mol_type = other DNA
tgaactggagggatg

SEQ ID NO: 11003 - DNA, 15 bp, synthetic construct
  source 1..15: mol_type = other DNA
gtgacattgtaagat

SEQ ID NO: 11004 - DNA, 15 bp, synthetic construct
  source 1..15: mol_type = other DNA
gtattgatgcagaaa

SEQ ID NO: 11005 - DNA, 15 bp, synthetic construct
  source 1..15: mol_type = other DNA
cttgtagcccaaaat

SEQ ID NO: 11006 - DNA, 15 bp, synthetic construct
  source 1..15: mol_type = other DNA
gcctgccataatgca

SEQ ID NO: 11007 - DNA, 15 bp, synthetic construct
  source 1..15: mol_type = other DNA
cctgtgcacaatgac

SEQ ID NO: 11008 - DNA, 15 bp, synthetic construct
  source 1..15: mol_type = other DNA
gacagaagtctctcc

SEQ ID NO: 11009 - DNA, 15 bp, synthetic construct
  source 1..15: mol_type = other DNA
gggagatgtgccacc

SEQ ID NO: 11010 - DNA, 15 bp, synthetic construct
  source 1..15: mol_type = other DNA
cggtggcttgtacac

SEQ ID NO: 11011 - DNA, 15 bp, synthetic construct
  source 1..15: mol_type = other DNA
ggtaggtgtgataga

SEQ ID NO: 11012 - DNA, 15 bp, synthetic construct
  source 1..15: mol_type = other DNA
acttcatcacagata

SEQ ID NO: 11013 - DNA, 15 bp, synthetic construct
  source 1..15: mol_type = other DNA
tccaaccacaagcac

SEQ ID NO: 11014 - DNA, 15 bp, synthetic construct
  source 1..15: mol_type = other DNA
aatgaaactccagga

SEQ ID NO: 11015 - DNA, 15 bp, synthetic construct
  source 1..15: mol_type = other DNA
gccgccttgattcat

SEQ ID NO: 11016 - DNA, 15 bp, synthetic construct
  source 1..15: mol_type = other DNA
gtcacacaggtaatt

SEQ ID NO: 11017 - DNA, 15 bp, synthetic construct
  source 1..15: mol_type = other DNA
cgaggatcctgcaac

SEQ ID NO: 11018 - DNA, 15 bp, synthetic construct
  source 1..15: mol_type = other DNA
tcactaagagctcct

SEQ ID NO: 11019 - DNA, 15 bp, synthetic construct
  source 1..15: mol_type = other DNA
caacctgcctcacac

SEQ ID NO: 11020 - DNA, 15 bp, synthetic construct
  source 1..15: mol_type = other DNA
gtaggacagagaatg

SEQ ID NO: 11021 - DNA, 15 bp, synthetic construct
  source 1..15: mol_type = other DNA
aggagtctcttagca

SEQ ID NO: 11022 - DNA, 15 bp, synthetic construct
  source 1..15: mol_type = other DNA
gagggaactctggac

SEQ ID NO: 11023 - DNA, 15 bp, synthetic construct
  source 1..15: mol_type = other DNA
caactaccagttgaa

SEQ ID NO: 11024 - DNA, 15 bp, synthetic construct
  source 1..15: mol_type = other DNA
cctcaaggaaggtaa

SEQ ID NO: 11025 - DNA, 15 bp, synthetic construct
  source 1..15: mol_type = other DNA
agcaagtcctcaaat

SEQ ID NO: 11026 - DNA, 15 bp, synthetic construct
  source 1..15: mol_type = other DNA
gagactcacaccatc

SEQ ID NO: 11027 - DNA, 15 bp, synthetic construct
  source 1..15: mol_type = other DNA
tgcggtcacaagaca

SEQ ID NO: 11028 - DNA, 15 bp, synthetic construct
  source 1..15: mol_type = other DNA
tgtactcactctctc

SEQ ID NO: 11029 - DNA, 15 bp, synthetic construct
  source 1..15: mol_type = other DNA
tcgcagctctcagat

SEQ ID NO: 11030 - DNA, 15 bp, synthetic construct
  source 1..15: mol_type = other DNA
ttggatcctgcttgc

SEQ ID NO: 11031 - DNA, 15 bp, synthetic construct
  source 1..15: mol_type = other DNA
aggcagaccaaggtg

SEQ ID NO: 11032 - DNA, 15 bp, synthetic construct
  source 1..15: mol_type = other DNA
aagccagttgctaca

SEQ ID NO: 11033 - DNA, 15 bp, synthetic construct
  source 1..15: mol_type = other DNA
cacctctgtaggtca

SEQ ID NO: 11034 - DNA, 15 bp, synthetic construct
  source 1..15: mol_type = other DNA
ccagatcacatgaaa

SEQ ID NO: 11035 - DNA, 15 bp, synthetic construct
  source 1..15: mol_type = other DNA
cacaggtaccttcac

SEQ ID NO: 11036 - DNA, 15 bp, synthetic construct
  source 1..15: mol_type = other DNA
agtttttcagagtga

SEQ ID NO: 11037 - DNA, 15 bp, synthetic construct
  source 1..15: mol_type = other DNA
tcctgttgttggaca

SEQ ID NO: 11038 - DNA, 15 bp, synthetic construct
  source 1..15: mol_type = other DNA
cccaaattgtccatg

SEQ ID NO: 11039 - DNA, 15 bp, synthetic construct
  source 1..15: mol_type = other DNA
taccctttcaatagt

SEQ ID NO: 11040 - DNA, 15 bp, synthetic construct
  source 1..15: mol_type = other DNA
tccagttccatccat

SEQ ID NO: 11041 - DNA, 15 bp, synthetic construct
  source 1..15: mol_type = other DNA
tggaattactcaccc

SEQ ID NO: 11042 - DNA, 15 bp, synthetic construct
  source 1..15: mol_type = other DNA
gggttccttgactga

SEQ ID NO: 11043 - DNA, 15 bp, synthetic construct
  source 1..15: mol_type = other DNA
tgatctccataaggg

SEQ ID NO: 11044 - DNA, 15 bp, synthetic construct
  source 1..15: mol_type = other DNA
ttggagacaactgct

SEQ ID NO: 11045 - DNA, 15 bp, synthetic construct
  source 1..15: mol_type = other DNA
tcgagactggacaag

SEQ ID NO: 11046 - DNA, 15 bp, synthetic construct
  source 1..15: mol_type = other DNA
tgatgtagaacccgc

SEQ ID NO: 11047 - DNA, 15 bp, synthetic construct
  source 1..15: mol_type = other DNA
tctaaatggatgtag

SEQ ID NO: 11048 - DNA, 15 bp, synthetic construct
  source 1..15: mol_type = other DNA
gatctagaaactcaa

SEQ ID NO: 11049 - DNA, 15 bp, synthetic construct
  source 1..15: mol_type = other DNA
cttgttgctggaaag

SEQ ID NO: 11050 - DNA, 15 bp, synthetic construct
  source 1..15: mol_type = other DNA
gcctgttagtggtgg

SEQ ID NO: 11051 - DNA, 15 bp, synthetic construct
  source 1..15: mol_type = other DNA
gtttcctgtcaatat

SEQ ID NO: 11052 - DNA, 15 bp, synthetic construct
  source 1..15: mol_type = other DNA
gaactcatctcaaac

SEQ ID NO: 11053 - DNA, 15 bp, synthetic construct
  source 1..15: mol_type = other DNA
agacacaagatcaag

SEQ ID NO: 11054 - DNA, 15 bp, synthetic construct
  source 1..15: mol_type = other DNA
gccaacccaagttca

SEQ ID NO: 11055 - DNA, 15 bp, synthetic construct
  source 1..15: mol_type = other DNA
agagaccaaagagca

SEQ ID NO: 11056 - DNA, 15 bp, synthetic construct
  source 1..15: mol_type = other DNA
accagaactgctaca

SEQ ID NO: 11057 - DNA, 15 bp, synthetic construct
  source 1..15: mol_type = other DNA
tggagctaagtagac

SEQ ID NO: 11058 - DNA, 15 bp, synthetic construct
  source 1..15: mol_type = other DNA
gttggagacaactgc

SEQ ID NO: 11059 - DNA, 15 bp, synthetic construct
  source 1..15: mol_type = other DNA
agccactagacttta

SEQ ID NO: 11060 - DNA, 15 bp, synthetic construct
  source 1..15: mol_type = other DNA
tctgaaggtgttgca

SEQ ID NO: 11061 - DNA, 15 bp, synthetic construct
  source 1..15: mol_type = other DNA
atccagatgttctag

SEQ ID NO: 11062 - DNA, 15 bp, synthetic construct
  source 1..15: mol_type = other DNA
gggaaggatgcttca

SEQ ID NO: 11063 - DNA, 15 bp, synthetic construct
  source 1..15: mol_type = other DNA
ccgaagctccgctga

SEQ ID NO: 11064 - DNA, 15 bp, synthetic construct
  source 1..15: mol_type = other DNA
agcggcggcaatttc

SEQ ID NO: 11065 - DNA, 15 bp, synthetic construct
  source 1..15: mol_type = other DNA
ggacacttggctgtg

SEQ ID NO: 11066 - DNA, 15 bp, synthetic construct
  source 1..15: mol_type = other DNA
atttgtagaggaagt

SEQ ID NO: 11067 - DNA, 15 bp, synthetic construct
  source 1..15: mol_type = other DNA
ggttaagcttgcgca

SEQ ID NO: 11068 - DNA, 15 bp, synthetic construct
  source 1..15: mol_type = other DNA
ggtggtggatgcggt

SEQ ID NO: 11069 - DNA, 15 bp, synthetic construct
  source 1..15: mol_type = other DNA
gctcgtggtagaggt

SEQ ID NO: 11070 - DNA, 15 bp, synthetic construct
  source 1..15: mol_type = other DNA
tgacgatgcggttgt

SEQ ID NO: 11071 - DNA, 15 bp, synthetic construct
  source 1..15: mol_type = other DNA
cttcaacaccaggcc

SEQ ID NO: 11072 - DNA, 15 bp, synthetic construct
  source 1..15: mol_type = other DNA
acagggatatgaggg

SEQ ID NO: 11073 - DNA, 15 bp, synthetic construct
  source 1..15: mol_type = other DNA
aaagaaggccaggta

SEQ ID NO: 11074 - DNA, 15 bp, synthetic construct
  source 1..15: mol_type = other DNA
cctggcagaagttcc

SEQ ID NO: 11075 - DNA, 15 bp, synthetic construct
  source 1..15: mol_type = other DNA
actgcgctctgcgtt

SEQ ID NO: 11076 - DNA, 15 bp, synthetic construct
  source 1..15: mol_type = other DNA
cctggttgatgaagt

SEQ ID NO: 11077 - DNA, 15 bp, synthetic construct
  source 1..15: mol_type = other DNA
gagtctagcatcagg

SEQ ID NO: 11078 - DNA, 15 bp, synthetic construct
  source 1..15: mol_type = other DNA
gccattgactgcctg

SEQ ID NO: 11079 - DNA, 15 bp, synthetic construct
  source 1..15: mol_type = other DNA
ggttgttccgtgaca

SEQ ID NO: 11080 - DNA, 15 bp, synthetic construct
  source 1..15: mol_type = other DNA
ggtccactgtcttga

SEQ ID NO: 11081 - DNA, 15 bp, synthetic construct
  source 1..15: mol_type = other DNA
gccaagaaggtgctg

SEQ ID NO: 11082 - DNA, 15 bp, synthetic construct
  source 1..15: mol_type = other DNA
ttccacttgaggttg

SEQ ID NO: 11083 - DNA, 15 bp, synthetic construct
  source 1..15: mol_type = other DNA
taacagttgccgtcc

SEQ ID NO: 11084 - DNA, 15 bp, synthetic construct
  source 1..15: mol_type = other DNA
agggttggcgcttac

SEQ ID NO: 11085 - DNA, 15 bp, synthetic construct
  source 1..15: mol_type = other DNA
ggtctcatcgagtga

SEQ ID NO: 11086 - DNA, 15 bp, synthetic construct
  source 1..15: mol_type = other DNA
gctgttatcaacagc

SEQ ID NO: 11087 - DNA, 15 bp, synthetic construct
  source 1..15: mol_type = other DNA
cacaatcctgctctg

SEQ ID NO: 11088 - DNA, 15 bp, synthetic construct
  source 1..15: mol_type = other DNA
ctggtgtgatcaggt

SEQ ID NO: 11089 - DNA, 15 bp, synthetic construct
  source 1..15: mol_type = other DNA
gggtagtactgagcc

SEQ ID NO: 11090 - DNA, 15 bp, synthetic construct
  source 1..15: mol_type = other DNA
acacgtggacgttct

SEQ ID NO: 11091 - DNA, 15 bp, synthetic construct
  source 1..15: mol_type = other DNA
ctttttctacttggt

SEQ ID NO: 11092 - DNA, 15 bp, synthetic construct
  source 1..15: mol_type = other DNA
tagatatcgacattg

SEQ ID NO: 11093 - DNA, 15 bp, synthetic construct
  source 1..15: mol_type = other DNA
gctgtgcgggatagg

SEQ ID NO: 11094 - DNA, 15 bp, synthetic construct
  source 1..15: mol_type = other DNA
agatattgttcttcg

SEQ ID NO: 11095 - DNA, 15 bp, synthetic construct
  source 1..15: mol_type = other DNA
atctctgtgtctcaa

SEQ ID NO: 11096 - DNA, 15 bp, synthetic construct
  source 1..15: mol_type = other DNA
tcccgtacactcctg

SEQ ID NO: 11097 - DNA, 15 bp, synthetic construct
  source 1..15: mol_type = other DNA
gttccagtcgtcttg

SEQ ID NO: 11098 - DNA, 15 bp, synthetic construct
  source 1..15: mol_type = other DNA
gctgtcatccactat

SEQ ID NO: 11099 - DNA, 15 bp, synthetic construct
  source 1..15: mol_type = other DNA
cactgtcccggatgg

SEQ ID NO: 11100 - DNA, 15 bp, synthetic construct
  source 1..15: mol_type = other DNA
atgccgtccaatgcc

SEQ ID NO: 11101 - DNA, 15 bp, synthetic construct
  source 1..15: mol_type = other DNA
tttgtcgataaatcc

SEQ ID NO: 11102 - DNA, 15 bp, synthetic construct
  source 1..15: mol_type = other DNA
gagtacacctgaagg

SEQ ID NO: 11103 - DNA, 15 bp, synthetic construct
  source 1..15: mol_type = other DNA
tcacgatccactcgg

SEQ ID NO: 11104 - DNA, 15 bp, synthetic construct
  source 1..15: mol_type = other DNA
gcttcatcagcgcaa

SEQ ID NO: 11105 - DNA, 15 bp, synthetic construct
  source 1..15: mol_type = other DNA
gccgtgggtcagtat

SEQ ID NO: 11106 - DNA, 15 bp, synthetic construct
  source 1..15: mol_type = other DNA
tcccaggtttcgaag

SEQ ID NO: 11107 - DNA, 15 bp, synthetic construct
  source 1..15: mol_type = other DNA
gagatagtcgggccg

SEQ ID NO: 11108 - DNA, 15 bp, synthetic construct
  source 1..15: mol_type = other DNA
gaattcttagtggtt

SEQ ID NO: 11109 - DNA, 15 bp, synthetic construct
  source 1..15: mol_type = other DNA
cccggatcatgcttt

SEQ ID NO: 11110 - DNA, 15 bp, synthetic construct
  source 1..15: mol_type = other DNA
aatagtagggcgatt

SEQ ID NO: 11111 - DNA, 15 bp, synthetic construct
  source 1..15: mol_type = other DNA
ctcttgatggcagag

SEQ ID NO: 11112 - DNA, 15 bp, synthetic construct
  source 1..15: mol_type = other DNA
gtctgtagttgcttc

SEQ ID NO: 11113 - DNA, 15 bp, synthetic construct
  source 1..15: mol_type = other DNA
tccgtgtctcaagga

SEQ ID NO: 11114 - DNA, 15 bp, synthetic construct
  source 1..15: mol_type = other DNA
tggttatctctcagc

SEQ ID NO: 11115 - DNA, 15 bp, synthetic construct
  source 1..15: mol_type = other DNA
caaagtagacctgcc

SEQ ID NO: 11116 - DNA, 15 bp, synthetic construct
  source 1..15: mol_type = other DNA
tgttcagctccgttt

SEQ ID NO: 11117 - DNA, 15 bp, synthetic construct
  source 1..15: mol_type = other DNA
ggctcagcaatgagt

SEQ ID NO: 11118 - DNA, 15 bp, synthetic construct
  source 1..15: mol_type = other DNA
tcaatttctaggtga

SEQ ID NO: 11119 - DNA, 15 bp, synthetic construct
  source 1..15: mol_type = other DNA
aggcgtttgggaagg

SEQ ID NO: 11120 - DNA, 15 bp, synthetic construct
  source 1..15: mol_type = other DNA
ggtgtctgaaggagg

SEQ ID NO: 11121 - DNA, 15 bp, synthetic construct
  source 1..15: mol_type = other DNA
caggcttgtcactcg

SEQ ID NO: 11122 - DNA, 15 bp, synthetic construct
  source 1..15: mol_type = other DNA
attccagatgtcagg

SEQ ID NO: 11123 - DNA, 15 bp, synthetic construct
  source 1..15: mol_type = other DNA
gttctaagcttgggt

SEQ ID NO: 11124 - DNA, 15 bp, synthetic construct
  source 1..15: mol_type = other DNA
actgccaaagaaatt

SEQ ID NO: 11125 - DNA, 15 bp, synthetic construct
  source 1..15: mol_type = other DNA
tttttaaagtggcac

SEQ ID NO: 11126 - DNA, 15 bp, synthetic construct
  source 1..15: mol_type = other DNA
tctcggaagaataat

SEQ ID NO: 11127 - DNA, 15 bp, synthetic construct
  source 1..15: mol_type = other DNA
acaggtccagagaat

SEQ ID NO: 11128 - DNA, 15 bp, synthetic construct
  source 1..15: mol_type = other DNA
tgtatcggcaactga

SEQ ID NO: 11129 - DNA, 15 bp, synthetic construct
  source 1..15: mol_type = other DNA
cttcacaggtgcatt

SEQ ID NO: 11130 - DNA, 15 bp, synthetic construct
  source 1..15: mol_type = other DNA
agaattccagagcaa

SEQ ID NO: 11131 - DNA, 15 bp, synthetic construct
  source 1..15: mol_type = other DNA
accattaagctccca

SEQ ID NO: 11132 - DNA, 15 bp, synthetic construct
  source 1..15: mol_type = other DNA
ttttccaggtcaatg

SEQ ID NO: 11133 - DNA, 15 bp, synthetic construct
  source 1..15: mol_type = other DNA
gagtcgaccttcggt

SEQ ID NO: 11134 - DNA, 15 bp, synthetic construct
  source 1..15: mol_type = other DNA
tgttagaggaggagt

SEQ ID NO: 11135 - DNA, 15 bp, synthetic construct
  source 1..15: mol_type = other DNA
gttttcgtggtgaca

SEQ ID NO: 11136 - DNA, 15 bp, synthetic construct
  source 1..15: mol_type = other DNA
ctctatctccgtagc

SEQ ID NO: 11137 - DNA, 15 bp, synthetic construct
  source 1..15: mol_type = other DNA
ctgcactcgtggcag

SEQ ID NO: 11138 - DNA, 15 bp, synthetic construct
  source 1..15: mol_type = other DNA
gtctgccaaggtttt

SEQ ID NO: 11139 - DNA, 15 bp, synthetic construct
  source 1..15: mol_type = other DNA
ggagctcggtcttga

SEQ ID NO: 11140 - DNA, 15 bp, synthetic construct
  source 1..15: mol_type = other DNA
tctgcgtcacagaca

SEQ ID NO: 11141 - DNA, 15 bp, synthetic construct
  source 1..15: mol_type = other DNA
gagctgaccacgtcg

SEQ ID NO: 11142 - DNA, 15 bp, synthetic construct
  source 1..15: mol_type = other DNA
cacagattgcgtccg

SEQ ID NO: 11143 - DNA, 15 bp, synthetic construct
  source 1..15: mol_type = other DNA
ggtatgcatggcata

SEQ ID NO: 11144 - DNA, 15 bp, synthetic construct
  source 1..15: mol_type = other DNA
tcggcacctagaacg

SEQ ID NO: 11145 - DNA, 15 bp, synthetic construct
  source 1..15: mol_type = other DNA
ttgaggaccagcaac

SEQ ID NO: 11146 - DNA, 15 bp, synthetic construct
  source 1..15: mol_type = other DNA
ttcgtcccattcaca

SEQ ID NO: 11147 - DNA, 15 bp, synthetic construct
  source 1..15: mol_type = other DNA
tccttggaatgcagt

SEQ ID NO: 11148 - DNA, 15 bp, synthetic construct
  source 1..15: mol_type = other DNA
acatgacagaaccca

SEQ ID NO: 11149 - DNA, 15 bp, synthetic construct
  source 1..15: mol_type = other DNA
tcccatgatgaaatc

SEQ ID NO: 11150 - DNA, 15 bp, synthetic construct
  source 1..15: mol_type = other DNA
tgggcagttactaca

SEQ ID NO: 11151 - DNA, 15 bp, synthetic construct
  source 1..15: mol_type = other DNA
tgcaagacatggaat

SEQ ID NO: 11152 - DNA, 15 bp, synthetic construct
  source 1..15: mol_type = other DNA
cagatacccatttgc

SEQ ID NO: 11153 - DNA, 15 bp, synthetic construct
  source 1..15: mol_type = other DNA
cgtcagcgcaagaaa

SEQ ID NO: 11154 - DNA, 15 bp, synthetic construct
  source 1..15: mol_type = other DNA
tgcgctggagaaact

SEQ ID NO: 11155 - DNA, 15 bp, synthetic construct
  source 1..15: mol_type = other DNA
gcacttattttcgtc

SEQ ID NO: 11156 - DNA, 15 bp, synthetic construct
  source 1..15: mol_type = other DNA
aacagacaaacaaag

SEQ ID NO: 11157 - DNA, 15 bp, synthetic construct
  source 1..15: mol_type = other DNA
caacagagaaacgga

SEQ ID NO: 11158 - DNA, 15 bp, synthetic construct
  source 1..15: mol_type = other DNA
ctgcctgcatatgtc

SEQ ID NO: 11159 - DNA, 15 bp, synthetic construct
  source 1..15: mol_type = other DNA
tttgacaaggtgctc

SEQ ID NO: 11160 - DNA, 15 bp, synthetic construct
  source 1..15: mol_type = other DNA
aatcccagagtaaaa

SEQ ID NO: 11161 - DNA, 15 bp, synthetic construct
  source 1..15: mol_type = other DNA
aggaacactccttcc

SEQ ID NO: 11162 - DNA, 15 bp, synthetic construct
  source 1..15: mol_type = other DNA
gcatgaccagtctct

SEQ ID NO: 11163 - DNA, 15 bp, synthetic construct
  source 1..15: mol_type = other DNA
gattttcggtgtgta

SEQ ID NO: 11164 - DNA, 15 bp, synthetic construct
  source 1..15: mol_type = other DNA
ggcaccagtatactt

SEQ ID NO: 11165 - DNA, 15 bp, synthetic construct
  source 1..15: mol_type = other DNA
ttgtttacaatcctg

SEQ ID NO: 11166 - DNA, 15 bp, synthetic construct
  source 1..15: mol_type = other DNA
atgccacgtttctga

SEQ ID NO: 11167 - DNA, 15 bp, synthetic construct
  source 1..15: mol_type = other DNA
gttttttgtccttga

SEQ ID NO: 11168 - DNA, 15 bp, synthetic construct
  source 1..15: mol_type = other DNA
tctggaaatcggcag

SEQ ID NO: 11169 - DNA, 15 bp, synthetic construct
  source 1..15: mol_type = other DNA
cttctagggcacttc

SEQ ID NO: 11170 - DNA, 15 bp, synthetic construct
  source 1..15: mol_type = other DNA
agctgaatagcagga

SEQ ID NO: 11171 - DNA, 15 bp, synthetic construct
  source 1..15: mol_type = other DNA
gaaaaccgggatgct

SEQ ID NO: 11172 - DNA, 15 bp, synthetic construct
  source 1..15: mol_type = other DNA
ggtacagagaaaggg

SEQ ID NO: 11173 - DNA, 15 bp, synthetic construct
  source 1..15: mol_type = other DNA
tcctctgaattagat

SEQ ID NO: 11174 - DNA, 15 bp, synthetic construct
  source 1..15: mol_type = other DNA
gctccatagtaaatt

SEQ ID NO: 11175 - DNA, 15 bp, synthetic construct
  source 1..15: mol_type = other DNA
cctcaggagagttat

SEQ ID NO: 11176 - DNA, 15 bp, synthetic construct
  source 1..15: mol_type = other DNA
tttctgcatctctac

SEQ ID NO: 11177 - DNA, 15 bp, synthetic construct
  source 1..15: mol_type = other DNA
gaatacatcgaaaca

SEQ ID NO: 11178 - DNA, 15 bp, synthetic construct
  source 1..15: mol_type = other DNA
gctggcatttaccct

SEQ ID NO: 11179 - DNA, 15 bp, synthetic construct
  source 1..15: mol_type = other DNA
tcttaaggcaagaag

SEQ ID NO: 11180 - DNA, 15 bp, synthetic construct
  source 1..15: mol_type = other DNA
gtggctgtctgttaa

SEQ ID NO: 11181 - DNA, 15 bp, synthetic construct
  source 1..15: mol_type = other DNA
tttgttgatgtcctg

SEQ ID NO: 11182 - DNA, 15 bp, synthetic construct
  source 1..15: mol_type = other DNA
cccacctagcattga

SEQ ID NO: 11183 - DNA, 15 bp, synthetic construct
  source 1..15: mol_type = other DNA
cacagggaatggatc

SEQ ID NO: 11184 - DNA, 15 bp, synthetic construct
  source 1..15: mol_type = other DNA
gccacctggtagaaa

SEQ ID NO: 11185 - DNA, 15 bp, synthetic construct
  source 1..15: mol_type = other DNA
tatttctgctgttct

SEQ ID NO: 11186 - DNA, 15 bp, synthetic construct
  source 1..15: mol_type = other DNA
ggctttccttccgtg

SEQ ID NO: 11187 - DNA, 15 bp, synthetic construct
  source 1..15: mol_type = other DNA
ttctgtggagtcatc

SEQ ID NO: 11188 - DNA, 15 bp, synthetic construct
  source 1..15: mol_type = other DNA
ccacattagcagcaa

SEQ ID NO: 11189 - DNA, 15 bp, synthetic construct
  source 1..15: mol_type = other DNA
tgtctgcaatcagtt

SEQ ID NO: 11190 - DNA, 15 bp, synthetic construct
  source 1..15: mol_type = other DNA
ttcatagactggcat

SEQ ID NO: 11191 - DNA, 15 bp, synthetic construct
  source 1..15: mol_type = other DNA
gtgacatctccatcc

SEQ ID NO: 11192 - DNA, 15 bp, synthetic construct
  source 1..15: mol_type = other DNA
attgtgtccttcctc

SEQ ID NO: 11193 - DNA, 15 bp, synthetic construct
  source 1..15: mol_type = other DNA
gtgaagcgtcagagg

SEQ ID NO: 11194 - DNA, 15 bp, synthetic construct
  source 1..15: mol_type = other DNA
tgtactggcatgtaa

SEQ ID NO: 11195 - DNA, 15 bp, synthetic construct
  source 1..15: mol_type = other DNA
ctccatgaaggatgg

SEQ ID NO: 11196 - DNA, 15 bp, synthetic construct
  source 1..15: mol_type = other DNA
ctgggcacaatgctg

SEQ ID NO: 11197 - DNA, 15 bp, synthetic construct
  source 1..15: mol_type = other DNA
gcagctctagttgaa

SEQ ID NO: 11198 - DNA, 15 bp, synthetic construct
  source 1..15: mol_type = other DNA
cacccggaagagtcc

SEQ ID NO: 11199 - DNA, 15 bp, synthetic construct
  source 1..15: mol_type = other DNA
caggctggacgttat

SEQ ID NO: 11200 - DNA, 15 bp, synthetic construct
  source 1..15: mol_type = other DNA
ggaaaccgaaggccg

SEQ ID NO: 11201 - DNA, 15 bp, synthetic construct
  source 1..15: mol_type = other DNA
cgaggtgtctcgatt

SEQ ID NO: 11202 - DNA, 15 bp, synthetic construct
  source 1..15: mol_type = other DNA
ttagtacaagttcca

SEQ ID NO: 11203 - DNA, 15 bp, synthetic construct
  source 1..15: mol_type = other DNA
ttaggaccacatgga

SEQ ID NO: 11204 - DNA, 15 bp, synthetic construct
  source 1..15: mol_type = other DNA
acccttcatcgtaca

SEQ ID NO: 11205 - DNA, 15 bp, synthetic construct
  source 1..15: mol_type = other DNA
gcaaccacagcgtcg

SEQ ID NO: 11206 - DNA, 15 bp, synthetic construct
  source 1..15: mol_type = other DNA
gccatccaactagtg

SEQ ID NO: 11207 - DNA, 15 bp, synthetic construct
  source 1..15: mol_type = other DNA
acacatcttccatgc

SEQ ID NO: 11208 - DNA, 15 bp, synthetic construct
  source 1..15: mol_type = other DNA
ttcaccacctccgtg

SEQ ID NO: 11209 - DNA, 15 bp, synthetic construct
  source 1..15: mol_type = other DNA
tgtgtgctgaggaag

SEQ ID NO: 11210 - DNA, 15 bp, synthetic construct
  source 1..15: mol_type = other DNA
cctgcatgcggatac

SEQ ID NO: 11211 - DNA, 15 bp, synthetic construct
  source 1..15: mol_type = other DNA
gggccttttaagaat

SEQ ID NO: 11212 - DNA, 15 bp, synthetic construct
  source 1..15: mol_type = other DNA
tgtagggtggcacac

SEQ ID NO: 11213 - DNA, 15 bp, synthetic construct
  source 1..15: mol_type = other DNA
tggatgtcatctgga

SEQ ID NO: 11214 - DNA, 15 bp, synthetic construct
  source 1..15: mol_type = other DNA
aacacgtctgcttgg

SEQ ID NO: 11215 - DNA, 15 bp, synthetic construct
  source 1..15: mol_type = other DNA
cctctttgatgcgct

SEQ ID NO: 11216 - DNA, 15 bp, synthetic construct
  source 1..15: mol_type = other DNA
gtgatgggatcttct

SEQ ID NO: 11217 - DNA, 15 bp, synthetic construct
  source 1..15: mol_type = other DNA
ggaaggacacgtcga

SEQ ID NO: 11218 - DNA, 15 bp, synthetic construct
  source 1..15: mol_type = other DNA
ttccagatcgcatgt

SEQ ID NO: 11219 - DNA, 15 bp, synthetic construct
  source 1..15: mol_type = other DNA
cccttcaaaagattc

SEQ ID NO: 11220 - DNA, 15 bp, synthetic construct
  source 1..15: mol_type = other DNA
tcgttgaattcacgg

SEQ ID NO: 11221 - DNA, 15 bp, synthetic construct
  source 1..15: mol_type = other DNA
aattggacggcggtt

SEQ ID NO: 11222 - DNA, 15 bp, synthetic construct
  source 1..15: mol_type = other DNA
ggcagcttgttcatg

SEQ ID NO: 11223 - DNA, 15 bp, synthetic construct
  source 1..15: mol_type = other DNA
aatagtccagacatg

SEQ ID NO: 11224 - DNA, 15 bp, synthetic construct
  source 1..15: mol_type = other DNA
ctgacaatgctgcaa

SEQ ID NO: 11225 - DNA, 15 bp, synthetic construct
  source 1..15: mol_type = other DNA
ctggaaaacctctgg

SEQ ID NO: 11226 - DNA, 15 bp, synthetic construct
  source 1..15: mol_type = other DNA
tgctgctttctgatg

SEQ ID NO: 11227 - DNA, 15 bp, synthetic construct
  source 1..15: mol_type = other DNA
ccctctactcgaatc

SEQ ID NO: 11228 - DNA, 15 bp, synthetic construct
  source 1..15: mol_type = other DNA
cgctgttctgcgcgt

SEQ ID NO: 11229 - DNA, 15 bp, synthetic construct
  source 1..15: mol_type = other DNA
cctttcttctggctc

SEQ ID NO: 11230 - DNA, 15 bp, synthetic construct
  source 1..15: mol_type = other DNA
gcgcttcgtaccatc

SEQ ID NO: 11231 - DNA, 15 bp, synthetic construct
  source 1..15: mol_type = other DNA
ttcaacagcatttca

SEQ ID NO: 11232 - DNA, 15 bp, synthetic construct
  source 1..15: mol_type = other DNA
cccagaggtacaaac

SEQ ID NO: 11233 - DNA, 15 bp, synthetic construct
  source 1..15: mol_type = other DNA
ctacagatccactcc

SEQ ID NO: 11234 - DNA, 15 bp, synthetic construct
  source 1..15: mol_type = other DNA
ttttgtagctagtag

SEQ ID NO: 11235 - DNA, 15 bp, synthetic construct
  source 1..15: mol_type = other DNA
gggtgtttcccaaga

SEQ ID NO: 11236 - DNA, 15 bp, synthetic construct
  source 1..15: mol_type = other DNA
tctgttcctggttcc

SEQ ID NO: 11237 - DNA, 15 bp, synthetic construct
  source 1..15: mol_type = other DNA
atgggcaggtaatgt

SEQ ID NO: 11238 - DNA, 15 bp, synthetic construct
  source 1..15: mol_type = other DNA
tgattcggtacaaca

SEQ ID NO: 11239 - DNA, 15 bp, synthetic construct
  source 1..15: mol_type = other DNA
aggaatctcacaggc

SEQ ID NO: 11240 - DNA, 15 bp, synthetic construct
  source 1..15: mol_type = other DNA
gcaatatggcccaga

SEQ ID NO: 11241 - DNA, 15 bp, synthetic construct
  source 1..15: mol_type = other DNA
gtcaaactggcattc

SEQ ID NO: 11242 - DNA, 15 bp, synthetic construct
  source 1..15: mol_type = other DNA
ctgaaatggttactg

SEQ ID NO: 11243 - DNA, 15 bp, synthetic construct
  source 1..15: mol_type = other DNA
gggcagagtacttta

SEQ ID NO: 11244 - DNA, 15 bp, synthetic construct
  source 1..15: mol_type = other DNA
caatgcatgttgaca

SEQ ID NO: 11245 - DNA, 15 bp, synthetic construct
  source 1..15: mol_type = other DNA
gccctgacattcagt

SEQ ID NO: 11246 - DNA, 15 bp, synthetic construct
  source 1..15: mol_type = other DNA
tttttgggcagaaaa

SEQ ID NO: 11247 - DNA, 15 bp, synthetic construct
  source 1..15: mol_type = other DNA
cagaatatgaagggt

SEQ ID NO: 11248 - DNA, 15 bp, synthetic construct
  source 1..15: mol_type = other DNA
cctggcaggcaaaag

SEQ ID NO: 11249 - DNA, 15 bp, synthetic construct
  source 1..15: mol_type = other DNA
acacaagaggaacca

SEQ ID NO: 11250 - DNA, 15 bp, synthetic construct
  source 1..15: mol_type = other DNA
tcactccaagcttgg

SEQ ID NO: 11251 - DNA, 15 bp, synthetic construct
  source 1..15: mol_type = other DNA
gtctggtgtcttcaa

SEQ ID NO: 11252 - DNA, 15 bp, synthetic construct
  source 1..15: mol_type = other DNA
acgcggctttccacc

SEQ ID NO: 11253 - DNA, 15 bp, synthetic construct
  source 1..15: mol_type = other DNA
cactgactacttggc

SEQ ID NO: 11254 - DNA, 15 bp, synthetic construct
  source 1..15: mol_type = other DNA
tgggcaaaaatgtga

SEQ ID NO: 11255 - DNA, 15 bp, synthetic construct
  source 1..15: mol_type = other DNA
ttcaagacttctcca

SEQ ID NO: 11256 - DNA, 15 bp, synthetic construct
  source 1..15: mol_type = other DNA
ctagatagcacctgc

SEQ ID NO: 11257 - DNA, 15 bp, synthetic construct
  source 1..15: mol_type = other DNA
tacattgtgccaaac

SEQ ID NO: 11258 - DNA, 15 bp, synthetic construct
  source 1..15: mol_type = other DNA
gttggccctttgaat

SEQ ID NO: 11259 - DNA, 15 bp, synthetic construct
  source 1..15: mol_type = other DNA
gaccttgtcgaagcc

SEQ ID NO: 11260 - DNA, 15 bp, synthetic construct
  source 1..15: mol_type = other DNA
ctggacggatgcgtg

SEQ ID NO: 11261 - DNA, 15 bp, synthetic construct
  source 1..15: mol_type = other DNA
agtgatgttgaagtc

SEQ ID NO: 11262 - DNA, 15 bp, synthetic construct
  source 1..15: mol_type = other DNA
ccctaaaccctcctg

SEQ ID NO: 11263 - DNA, 15 bp, synthetic construct
  source 1..15: mol_type = other DNA
ggtggccagaattgg

SEQ ID NO: 11264 - DNA, 15 bp, synthetic construct
  source 1..15: mol_type = other DNA
gggccggagacagtt

SEQ ID NO: 11265 - DNA, 15 bp, synthetic construct
  source 1..15: mol_type = other DNA
gaccgcatttattca

SEQ ID NO: 11266 - DNA, 15 bp, synthetic construct
  source 1..15: mol_type = other DNA
tttctccatctagaa

SEQ ID NO: 11267 - DNA, 15 bp, synthetic construct
  source 1..15: mol_type = other DNA
gaggtaatgacgatc

SEQ ID NO: 11268 - DNA, 15 bp, synthetic construct
  source 1..15: mol_type = other DNA
ggctatgcctgaagc

SEQ ID NO: 11269 - DNA, 15 bp, synthetic construct
  source 1..15: mol_type = other DNA
agggcctgatagacc

SEQ ID NO: 11270 - DNA, 15 bp, synthetic construct
  source 1..15: mol_type = other DNA
gtgcacagatggacg

SEQ ID NO: 11271 - DNA, 15 bp, synthetic construct
  source 1..15: mol_type = other DNA
cacgtggtcgtctca

SEQ ID NO: 11272 - DNA, 15 bp, synthetic construct
  source 1..15: mol_type = other DNA
gcgaatagcagcgag

SEQ ID NO: 11273 - DNA, 15 bp, synthetic construct
  source 1..15: mol_type = other DNA
ggctagagccatcca

SEQ ID NO: 11274 - DNA, 15 bp, synthetic construct
  source 1..15: mol_type = other DNA
gaggcctagagtcct

SEQ ID NO: 11275 - DNA, 15 bp, synthetic construct
  source 1..15: mol_type = other DNA
tcaacatgactgagt

SEQ ID NO: 11276 - DNA, 15 bp, synthetic construct
  source 1..15: mol_type = other DNA
aaggtgagagttgca

SEQ ID NO: 11277 - DNA, 15 bp, synthetic construct
  source 1..15: mol_type = other DNA
gctcggcaaacaaga

SEQ ID NO: 11278 - DNA, 15 bp, synthetic construct
  source 1..15: mol_type = other DNA
agggctgaccaagac

SEQ ID NO: 11279 - DNA, 15 bp, synthetic construct
  source 1..15: mol_type = other DNA
ggatcacgaccatct

SEQ ID NO: 11280 - DNA, 15 bp, synthetic construct
  source 1..15: mol_type = other DNA
cagtttcttatgtcc

SEQ ID NO: 11281 - DNA, 15 bp, synthetic construct
  source 1..15: mol_type = other DNA
caccactcatctcga

SEQ ID NO: 11282 - DNA, 15 bp, synthetic construct
  source 1..15: mol_type = other DNA
ccaccttcttgcagc

SEQ ID NO: 11283 - DNA, 15 bp, synthetic construct
  source 1..15: mol_type = other DNA
cttcgtgaaacatct

SEQ ID NO: 11284 - DNA, 15 bp, synthetic construct
  source 1..15: mol_type = other DNA
actccagaaaatctc

SEQ ID NO: 11285 - DNA, 15 bp, synthetic construct
  source 1..15: mol_type = other DNA
cagcaactgaacact

SEQ ID NO: 11286 - DNA, 15 bp, synthetic construct
  source 1..15: mol_type = other DNA
gcatgtcatattcac

SEQ ID NO: 11287 - DNA, 15 bp, synthetic construct
  source 1..15: mol_type = other DNA
tctctagagatttca

SEQ ID NO: 11288 - DNA, 15 bp, synthetic construct
  source 1..15: mol_type = other DNA
acatgtacaagagat

SEQ ID NO: 11289 - DNA, 15 bp, synthetic construct
  source 1..15: mol_type = other DNA
ttcacaagttgctgt

SEQ ID NO: 11290 - DNA, 15 bp, synthetic construct
  source 1..15: mol_type = other DNA
cggagtcaccaatct

SEQ ID NO: 11291 - DNA, 15 bp, synthetic construct
  source 1..15: mol_type = other DNA
tgccttactgtgggc

SEQ ID NO: 11292 - DNA, 15 bp, synthetic construct
  source 1..15: mol_type = other DNA
gagcttttccagtat

SEQ ID NO: 11293 - DNA, 15 bp, synthetic construct
  source 1..15: mol_type = other DNA
gcgtagatgtggtcc

SEQ ID NO: 11294 - DNA, 15 bp, synthetic construct
  source 1..15: mol_type = other DNA
ttttagtactgtgtc

SEQ ID NO: 11295 - DNA, 15 bp, synthetic construct
  source 1..15: mol_type = other DNA
gcaagggacatagat

SEQ ID NO: 11296 - DNA, 15 bp, synthetic construct
  source 1..15: mol_type = other DNA
gatctcctttcagta

SEQ ID NO: 11297 - DNA, 15 bp, synthetic construct
  source 1..15: mol_type = other DNA
tggttccaaaaccct

SEQ ID NO: 11298 - DNA, 15 bp, synthetic construct
  source 1..15: mol_type = other DNA
catttccagaaaggt

SEQ ID NO: 11299 - DNA, 15 bp, synthetic construct
  source 1..15: mol_type = other DNA
agcgcatgggttact

SEQ ID NO: 11300 - DNA, 15 bp, synthetic construct
  source 1..15: mol_type = other DNA
tgtacctgctggttg

SEQ ID NO: 11301 - DNA, 15 bp, synthetic construct
  source 1..15: mol_type = other DNA
acagtcttctccagc

SEQ ID NO: 11302 - DNA, 15 bp, synthetic construct
  source 1..15: mol_type = other DNA
tcctggttacagaaa

SEQ ID NO: 11303 - DNA, 15 bp, synthetic construct
  source 1..15: mol_type = other DNA
caggtgcatacgtag

SEQ ID NO: 11304 - DNA, 15 bp, synthetic construct
  source 1..15: mol_type = other DNA
gcctccgttaaggca

SEQ ID NO: 11305 - DNA, 15 bp, synthetic construct
  source 1..15: mol_type = other DNA
tgacactgtatttga

SEQ ID NO: 11306 - DNA, 15 bp, synthetic construct
  source 1..15: mol_type = other DNA
tgcaagttcaaatgc

SEQ ID NO: 11307 - DNA, 15 bp, synthetic construct
  source 1..15: mol_type = other DNA
gtgttaaaaccatca

SEQ ID NO: 11308 - DNA, 15 bp, synthetic construct
  source 1..15: mol_type = other DNA
cccatcttatctcca

SEQ ID NO: 11309 - DNA, 15 bp, synthetic construct
  source 1..15: mol_type = other DNA
agcggtaaagacccg

SEQ ID NO: 11310 - DNA, 15 bp, synthetic construct
  source 1..15: mol_type = other DNA
ctcacaaagtgcacc

SEQ ID NO: 11311 - DNA, 15 bp, synthetic construct
  source 1..15: mol_type = other DNA
tcagtccaacggaag

SEQ ID NO: 11312 - DNA, 15 bp, synthetic construct
  source 1..15: mol_type = other DNA
ccatgtgcgtcgatg

SEQ ID NO: 11313 - DNA, 15 bp, synthetic construct
  source 1..15: mol_type = other DNA
ggaatggtatgggaa

SEQ ID NO: 11314 - DNA, 15 bp, synthetic construct
  source 1..15: mol_type = other DNA
acatttgttcttcgt

SEQ ID NO: 11315 - DNA, 15 bp, synthetic construct
  source 1..15: mol_type = other DNA
ctggacttaaagata

SEQ ID NO: 11316 - DNA, 15 bp, synthetic construct
  source 1..15: mol_type = other DNA
aacgtccaaacaagc

SEQ ID NO: 11317 - DNA, 15 bp, synthetic construct
  source 1..15: mol_type = other DNA
ggagaacggaatcca

SEQ ID NO: 11318 - DNA, 15 bp, synthetic construct
  source 1..15: mol_type = other DNA
accggatagttggaa

SEQ ID NO: 11319 - DNA, 15 bp, synthetic construct
  source 1..15: mol_type = other DNA
ggtggtcttgttggc

SEQ ID NO: 11320 - DNA, 15 bp, synthetic construct
  source 1..15: mol_type = other DNA
cagtgacaccgtgtc

SEQ ID NO: 11321 - DNA, 15 bp, synthetic construct
  source 1..15: mol_type = other DNA
caaatccatcttcat

SEQ ID NO: 11322 - DNA, 15 bp, synthetic construct
  source 1..15: mol_type = other DNA
aggaatttggtcaaa

SEQ ID NO: 11323 - DNA, 15 bp, synthetic construct
  source 1..15: mol_type = other DNA
aacccggatcaatga

SEQ ID NO: 11324 - DNA, 15 bp, synthetic construct
  source 1..15: mol_type = other DNA
acagcagaaagttca

SEQ ID NO: 11325 - DNA, 15 bp, synthetic construct
  source 1..15: mol_type = other DNA
gggacaaaaaaaaga

SEQ ID NO: 11326 - DNA, 15 bp, synthetic construct
  source 1..15: mol_type = other DNA
tgggtgtgtctacag

SEQ ID NO: 11327 - DNA, 15 bp, synthetic construct
  source 1..15: mol_type = other DNA
aggacttataccggg

SEQ ID NO: 11328 - DNA, 15 bp, synthetic construct
  source 1..15: mol_type = other DNA
tgttcaagataagct

SEQ ID NO: 11329 - DNA, 15 bp, synthetic construct
  source 1..15: mol_type = other DNA
gggacagaactagtg

SEQ ID NO: 11330 - DNA, 15 bp, synthetic construct
  source 1..15: mol_type = other DNA
tctaatcttccgggc

SEQ ID NO: 11331 - DNA, 15 bp, synthetic construct
  source 1..15: mol_type = other DNA
ctgcgctgatagaca

SEQ ID NO: 11332 - DNA, 15 bp, synthetic construct
  source 1..15: mol_type = other DNA
cagcagtcaaataca

SEQ ID NO: 11333 - DNA, 15 bp, synthetic construct
  source 1..15: mol_type = other DNA
cctggtgagagatct

SEQ ID NO: 11334 - DNA, 15 bp, synthetic construct
  source 1..15: mol_type = other DNA
caggtttctggatta

SEQ ID NO: 11335 - DNA, 15 bp, synthetic construct
  source 1..15: mol_type = other DNA
tgcggatcttgtaca

SEQ ID NO: 11336 - DNA, 15 bp, synthetic construct
  source 1..15: mol_type = other DNA
gctgtaggaagctca

SEQ ID NO: 11337 - DNA, 15 bp, synthetic construct
  source 1..15: mol_type = other DNA
gcaacgcgagtctgt

SEQ ID NO: 11338 - DNA, 15 bp, synthetic construct
  source 1..15: mol_type = other DNA
cacaatgggcacgtg

SEQ ID NO: 11339 - DNA, 15 bp, synthetic construct
  source 1..15: mol_type = other DNA
tactcgatctcatca

SEQ ID NO: 11340 - DNA, 15 bp, synthetic construct
  source 1..15: mol_type = other DNA
gtgagtccgctgacc

SEQ ID NO: 11341 - DNA, 15 bp, synthetic construct
  source 1..15: mol_type = other DNA
aacaatgtgtctctt

SEQ ID NO: 11342 - DNA, 15 bp, synthetic construct
  source 1..15: mol_type = other DNA
ttccctgtcaggatc

SEQ ID NO: 11343 - DNA, 15 bp, synthetic construct
  source 1..15: mol_type = other DNA
gcattagacagcagc

SEQ ID NO: 11344 - DNA, 15 bp, synthetic construct
  source 1..15: mol_type = other DNA
cggaatatctcgaaa

SEQ ID NO: 11345 - DNA, 15 bp, synthetic construct
  source 1..15: mol_type = other DNA
ctgggtttgtcggtg

SEQ ID NO: 11346 - DNA, 15 bp, synthetic construct
  source 1..15: mol_type = other DNA
gcaactcagaagcag

SEQ ID NO: 11347 - DNA, 15 bp, synthetic construct
  source 1..15: mol_type = other DNA
ggaggttctgtcgag

SEQ ID NO: 11348 - DNA, 15 bp, synthetic construct
  source 1..15: mol_type = other DNA
tctcttccatttcac

SEQ ID NO: 11349 - DNA, 15 bp, synthetic construct
  source 1..15: mol_type = other DNA
cctgtctccggtact

SEQ ID NO: 11350 - DNA, 15 bp, synthetic construct
  source 1..15: mol_type = other DNA
cgcgctgctagttct

SEQ ID NO: 11351 - DNA, 15 bp, synthetic construct
  source 1..15: mol_type = other DNA
actcgctaaagcctg

SEQ ID NO: 11352 - DNA, 15 bp, synthetic construct
  source 1..15: mol_type = other DNA
atcgtgatgctgaga

SEQ ID NO: 11353 - DNA, 15 bp, synthetic construct
  source 1..15: mol_type = other DNA
ctatcttgcgctcct

SEQ ID NO: 11354 - DNA, 15 bp, synthetic construct
  source 1..15: mol_type = other DNA
gctggtaatatattg

SEQ ID NO: 11355 - DNA, 15 bp, synthetic construct
  source 1..15: mol_type = other DNA
gtctgaaagattgca

SEQ ID NO: 11356 - DNA, 15 bp, synthetic construct
  source 1..15: mol_type = other DNA
gtgcgggtgttcttg

SEQ ID NO: 11357 - DNA, 15 bp, synthetic construct
  source 1..15: mol_type = other DNA
tcctttaagggcatc

SEQ ID NO: 11358 - DNA, 15 bp, synthetic construct
  source 1..15: mol_type = other DNA
cgcgggctttgtcgt

SEQ ID NO: 11359 - DNA, 15 bp, synthetic construct
  source 1..15: mol_type = other DNA
ttgcgttcaaggtca

SEQ ID NO: 11360 - DNA, 15 bp, synthetic construct
  source 1..15: mol_type = other DNA
cagaagtgtcctttt

SEQ ID NO: 11361 - DNA, 15 bp, synthetic construct
  source 1..15: mol_type = other DNA
taggagtgtcggttg

SEQ ID NO: 11362 - DNA, 15 bp, synthetic construct
  source 1..15: mol_type = other DNA
ctttggagaggcgcc

SEQ ID NO: 11363 - DNA, 15 bp, synthetic construct
  source 1..15: mol_type = other DNA
agaccagattgattc

SEQ ID NO: 11364 - DNA, 15 bp, synthetic construct
  source 1..15: mol_type = other DNA
ccacactttcatatt

SEQ ID NO: 11365 - DNA, 15 bp, synthetic construct
  source 1..15: mol_type = other DNA
tccagcttcggacgg

SEQ ID NO: 11366 - DNA, 15 bp, synthetic construct
  source 1..15: mol_type = other DNA
gcgggtggacgtagt

SEQ ID NO: 11367 - DNA, 15 bp, synthetic construct
  source 1..15: mol_type = other DNA
caggcggccaatagt

SEQ ID NO: 11368 - DNA, 15 bp, synthetic construct
  source 1..15: mol_type = other DNA
aacatccacatcgat

SEQ ID NO: 11369 - DNA, 15 bp, synthetic construct
  source 1..15: mol_type = other DNA
gtattcacgaaggtg

SEQ ID NO: 11370 - DNA, 15 bp, synthetic construct
  source 1..15: mol_type = other DNA
cgccgattgagggct

SEQ ID NO: 11371 - DNA, 15 bp, synthetic construct
  source 1..15: mol_type = other DNA
gtggttgtggtacag

SEQ ID NO: 11372 - DNA, 15 bp, synthetic construct
  source 1..15: mol_type = other DNA
ggaacaggtatttga

SEQ ID NO: 11373 - DNA, 15 bp, synthetic construct
  source 1..15: mol_type = other DNA
ttccggaatgcacgc

SEQ ID NO: 11374 - DNA, 15 bp, synthetic construct
  source 1..15: mol_type = other DNA
ccgaaaggtcccagg

SEQ ID NO: 11375 - DNA, 15 bp, synthetic construct
  source 1..15: mol_type = other DNA
aggaagtcgtcgccc

SEQ ID NO: 11376 - DNA, 15 bp, synthetic construct
  source 1..15: mol_type = other DNA
accacctcaaagtga

SEQ ID NO: 11377 - DNA, 15 bp, synthetic construct
  source 1..15: mol_type = other DNA
ggtgtgatggtctga

SEQ ID NO: 11378 - DNA, 15 bp, synthetic construct
  source 1..15: mol_type = other DNA
cctcattgcattcct

SEQ ID NO: 11379 - DNA, 15 bp, synthetic construct
  source 1..15: mol_type = other DNA
aaagccttggcgaaa

SEQ ID NO: 11380 - DNA, 15 bp, synthetic construct
  source 1..15: mol_type = other DNA
tgaagtcggcttcac

SEQ ID NO: 11381 - DNA, 15 bp, synthetic construct
  source 1..15: mol_type = other DNA
attcctgaacaagtg

SEQ ID NO: 11382 - DNA, 15 bp, synthetic construct
  source 1..15: mol_type = other DNA
gacttacagcttccc

SEQ ID NO: 11383 - DNA, 15 bp, synthetic construct
  source 1..15: mol_type = other DNA
acggaggccgtcact

SEQ ID NO: 11384 - DNA, 15 bp, synthetic construct
  source 1..15: mol_type = other DNA
ctggcacgttttggt

SEQ ID NO: 11385 - DNA, 15 bp, synthetic construct
  source 1..15: mol_type = other DNA
agggctgcgttgtgc

SEQ ID NO: 11386 - DNA, 15 bp, synthetic construct
  source 1..15: mol_type = other DNA
ttgaagtgtgattga

SEQ ID NO: 11387 - DNA, 15 bp, synthetic construct
  source 1..15: mol_type = other DNA
tgtcacggtaccatt

SEQ ID NO: 11388 - DNA, 15 bp, synthetic construct
  source 1..15: mol_type = other DNA
tgacagcaggacttg

SEQ ID NO: 11389 - DNA, 15 bp, synthetic construct
  source 1..15: mol_type = other DNA
tcatgcatgatggca

SEQ ID NO: 11390 - DNA, 15 bp, synthetic construct
  source 1..15: mol_type = other DNA
catctcccacaacat

SEQ ID NO: 11391 - DNA, 15 bp, synthetic construct
  source 1..15: mol_type = other DNA
gcaggatttccggtg

SEQ ID NO: 11392 - DNA, 15 bp, synthetic construct
  source 1..15: mol_type = other DNA
cagcctcagtttcta

SEQ ID NO: 11393 - DNA, 15 bp, synthetic construct
  source 1..15: mol_type = other DNA
catgaagtcattggc

SEQ ID NO: 11394 - DNA, 15 bp, synthetic construct
  source 1..15: mol_type = other DNA
ctcgccttcatgcag

SEQ ID NO: 11395 - DNA, 15 bp, synthetic construct
  source 1..15: mol_type = other DNA
tggatatccgtcctg

SEQ ID NO: 11396 - DNA, 15 bp, synthetic construct
  source 1..15: mol_type = other DNA
gattttgtgtagtcg

SEQ ID NO: 11397 - DNA, 15 bp, synthetic construct
  source 1..15: mol_type = other DNA
gccttttgcactgct

SEQ ID NO: 11398 - DNA, 15 bp, synthetic construct
  source 1..15: mol_type = other DNA
cttcagaaagcgctg

SEQ ID NO: 11399 - DNA, 15 bp, synthetic construct
  source 1..15: mol_type = other DNA
ctgtgtgagaagaag

SEQ ID NO: 11400 - DNA, 15 bp, synthetic construct
  source 1..15: mol_type = other DNA
ccgtggaaacgccgt

SEQ ID NO: 11401 - DNA, 15 bp, synthetic construct
  source 1..15: mol_type = other DNA
gaaaccctcttgaga

SEQ ID NO: 11402 - DNA, 15 bp, synthetic construct
  source 1..15: mol_type = other DNA
gccaaggaagtttat

SEQ ID NO: 11403 - DNA, 15 bp, synthetic construct
  source 1..15: mol_type = other DNA
aggtacatgaaagac

SEQ ID NO: 11404 - DNA, 15 bp, synthetic construct
  source 1..15: mol_type = other DNA
tttaaggaaattgcc

SEQ ID NO: 11405 - DNA, 15 bp, synthetic construct
  source 1..15: mol_type = other DNA
aagcgagcatgattt

SEQ ID NO: 11406 - DNA, 15 bp, synthetic construct
  source 1..15: mol_type = other DNA
tgaactctttcacta

SEQ ID NO: 11407 - DNA, 15 bp, synthetic construct
  source 1..15: mol_type = other DNA
cttgttgatgtcaaa

SEQ ID NO: 11408 - DNA, 15 bp, synthetic construct
  source 1..15: mol_type = other DNA
gatgaaatgaggcct

SEQ ID NO: 11409 - DNA, 15 bp, synthetic construct
  source 1..15: mol_type = other DNA
gcgggctcactgttg

SEQ ID NO: 11410 - DNA, 15 bp, synthetic construct
  source 1..15: mol_type = other DNA
gtctagggtcatttg

SEQ ID NO: 11411 - DNA, 15 bp, synthetic construct
  source 1..15: mol_type = other DNA
tggcattctccacag

SEQ ID NO: 11412 - DNA, 15 bp, synthetic construct
  source 1..15: mol_type = other DNA
tctcctcgggaaaag

SEQ ID NO: 11413 - DNA, 15 bp, synthetic construct
  source 1..15: mol_type = other DNA
ttcaatcccagcttg

SEQ ID NO: 11414 - DNA, 15 bp, synthetic construct
  source 1..15: mol_type = other DNA
taagtgcaacactac

SEQ ID NO: 11415 - DNA, 15 bp, synthetic construct
  source 1..15: mol_type = other DNA
tcgcgtcggaacgtg

SEQ ID NO: 11416 - DNA, 15 bp, synthetic construct
  source 1..15: mol_type = other DNA
tgacgcatttcccgc

SEQ ID NO: 11417 - DNA, 15 bp, synthetic construct
  source 1..15: mol_type = other DNA
tctctatccgaccat

SEQ ID NO: 11418 - DNA, 15 bp, synthetic construct
  source 1..15: mol_type = other DNA
ggccaggttgagacc

SEQ ID NO: 11419 - DNA, 32 bp, synthetic construct
  source 1..32: mol_type = other DNA
acactctttccctacacgacgctcttccgatc

SEQ ID NO: 11420 - DNA, 32 bp, synthetic construct
  source 1..32: mol_type = other DNA
tcggcgttgtctgctatcgttcttggcactcc

SEQ ID NO: 11421 - DNA, 32 bp, synthetic construct
  source 1..32: mol_type = other DNA
cacaacgggagctgtggaattggttcacctgg

SEQ ID NO: 11422 - DNA, 32 bp, synthetic construct
  source 1..32: mol_type = other DNA
tgttgcatctccacccggattgagccttcagc

SEQ ID NO: 11423 - DNA, 32 bp, synthetic construct
  source 1..32: mol_type = other DNA
tggactaagactcgtcctccagcggacctaag

SEQ ID NO: 11424 - DNA, 32 bp, synthetic construct
  source 1..32: mol_type = other DNA
tacgacacactcgggctctatgggcttcatgg

SEQ ID NO: 11425 - DNA, 32 bp, synthetic construct
  source 1..32: mol_type = other DNA
gtatgatggtgttgcggcttctcgcttaacgc

SEQ ID NO: 11426 - DNA, 32 bp, synthetic construct
  source 1..32: mol_type = other DNA
tcttgagtcattcgcagggcatgtgccagacc

SEQ ID NO: 11427 - DNA, 27 bp, synthetic construct
  source 1..27: mol_type = other DNA
ttgcattgagtcctgggcagaagtttt

SEQ ID NO: 11428 - DNA, 20 bp, synthetic construct
  source 1..20: mol_type = other DNA
agacacagtagcccaggcta

SEQ ID NO: 11429 - DNA, 20 bp, synthetic construct
  source 1..20: mol_type = other DNA
ccataggaagaattccatac

SEQ ID NO: 11430 - DNA, 20 bp, synthetic construct
  source 1..20: mol_type = other DNA
gctgtctttttgtcccattc

SEQ ID NO: 11431 - DNA, 20 bp, synthetic construct
  source 1..20: mol_type = other DNA
gcagagctaatagcagtaga

SEQ ID NO: 11432 - DNA, 20 bp, synthetic construct
  source 1..20: mol_type = other DNA
ggtgatcagttggtgtcatg

SEQ ID NO: 11433 - DNA, 20 bp, synthetic construct
  source 1..20: mol_type = other DNA
gctagcaccttcttttctag

SEQ ID NO: 11434 - DNA, 20 bp, synthetic construct
  source 1..20: mol_type = other DNA
cctcacgtcgctgaataatt

SEQ ID NO: 11435 - DNA, 20 bp, synthetic construct
  source 1..20: mol_type = other DNA
acacagtctatgtggccagc

SEQ ID NO: 11436 - DNA, 20 bp, synthetic construct
  source 1..20: mol_type = other DNA
tgaaggtcagcttttcagtc

SEQ ID NO: 11437 - DNA, 20 bp, synthetic construct
  source 1..20: mol_type = other DNA
atcccaggcacttgcgcagg

SEQ ID NO: 11438 - DNA, 20 bp, synthetic construct
  source 1..20: mol_type = other DNA
atgcagagcagacagatgca

SEQ ID NO: 11439 - DNA, 20 bp, synthetic construct
  source 1..20: mol_type = other DNA
tcaagtcgatgttgctgtcc

SEQ ID NO: 11440 - DNA, 20 bp, synthetic construct
  source 1..20: mol_type = other DNA
gtgtgggcgctgaccttgcg

SEQ ID NO: 11441 - DNA, 20 bp, synthetic construct
  source 1..20: mol_type = other DNA
atgttgctgctgttcatcat

SEQ ID NO: 11442 - DNA, 20 bp, synthetic construct
  source 1..20: mol_type = other DNA
acaaaaggtggaaatgaggc

SEQ ID NO: 11443 - DNA, 20 bp, synthetic construct
  source 1..20: mol_type = other DNA
ttggccttcctcttggccgt

SEQ ID NO: 11444 - DNA, 20 bp, synthetic construct
  source 1..20: mol_type = other DNA
gccaaagcaaatggcacaga

SEQ ID NO: 11445 - DNA, 20 bp, synthetic construct
  source 1..20: mol_type = other DNA
ggtgagaaaccgttcaggta

SEQ ID NO: 11446 - DNA, 20 bp, synthetic construct
  source 1..20: mol_type = other DNA
cttagccgcgatggtctcat

SEQ ID NO: 11447 - DNA, 20 bp, synthetic construct
  source 1..20: mol_type = other DNA
cacttcatgctgctgctgtg

SEQ ID NO: 11448 - DNA, 20 bp, synthetic construct
  source 1..20: mol_type = other DNA
tgttcatgatgctgtatggg

SEQ ID NO: 11449 - DNA, 20 bp, synthetic construct
  source 1..20: mol_type = other DNA
acggaagtctggagtatcac

SEQ ID NO: 11450 - DNA, 20 bp, synthetic construct
  source 1..20: mol_type = other DNA
tcaaattcacccacccatca

SEQ ID NO: 11451 - DNA, 20 bp, synthetic construct
  source 1..20: mol_type = other DNA
cccacaagttcccaatctga

SEQ ID NO: 11452 - DNA, 20 bp, synthetic construct
  source 1..20: mol_type = other DNA
gcagtccaccgcataattat

SEQ ID NO: 11453 - DNA, 20 bp, synthetic construct
  source 1..20: mol_type = other DNA
tgttctgaccctggcatatc

SEQ ID NO: 11454 - DNA, 20 bp, synthetic construct
  source 1..20: mol_type = other DNA
ccgtgtctcggcactgctgc

SEQ ID NO: 11455 - DNA, 20 bp, synthetic construct
  source 1..20: mol_type = other DNA
ggtcctcttgttcctcctca

SEQ ID NO: 11456 - DNA, 20 bp, synthetic construct
  source 1..20: mol_type = other DNA
cttccaactgtgtcaatgca

SEQ ID NO: 11457 - DNA, 20 bp, synthetic construct
  source 1..20: mol_type = other DNA
catgatgccgagccgccacc

SEQ ID NO: 11458 - DNA, 20 bp, synthetic construct
  source 1..20: mol_type = other DNA
gatcatggagcctcgtgcca

SEQ ID NO: 11459 - DNA, 20 bp, synthetic construct
  source 1..20: mol_type = other DNA
acactacacgcccagggctc

SEQ ID NO: 11460 - DNA, 20 bp, synthetic construct
  source 1..20: mol_type = other DNA
ggaacacaggcgttttctgc

SEQ ID NO: 11461 - DNA, 20 bp, synthetic construct
  source 1..20: mol_type = other DNA
tagcatcaatatgcatggga

SEQ ID NO: 11462 - DNA, 20 bp, synthetic construct
  source 1..20: mol_type = other DNA
ggcaatagtcagggcagggc

SEQ ID NO: 11463 - DNA, 20 bp, synthetic construct
  source 1..20: mol_type = other DNA
gcgtgggaaacctcgattct

SEQ ID NO: 11464 - DNA, 20 bp, synthetic construct
  source 1..20: mol_type = other DNA
gaacagaacaaaggcaatac

SEQ ID NO: 11465 - DNA, 20 bp, synthetic construct
  source 1..20: mol_type = other DNA
aaagtctctgatatcggaag

SEQ ID NO: 11466 - DNA, 20 bp, synthetic construct
  source 1..20: mol_type = other DNA
aagaaccataccactgtccg

SEQ ID NO: 11467 - DNA, 20 bp, synthetic construct
  source 1..20: mol_type = other DNA
acctgatgacatgtacacct

SEQ ID NO: 11468 - DNA, 20 bp, synthetic construct
  source 1..20: mol_type = other DNA
ctcccgggatcttgcatttc

SEQ ID NO: 11469 - DNA, 20 bp, synthetic construct
  source 1..20: mol_type = other DNA
agattgttgcagcggttctt

SEQ ID NO: 11470 - DNA, 20 bp, synthetic construct
  source 1..20: mol_type = other DNA
cgttctcacaggcagagcag

SEQ ID NO: 11471 - DNA, 20 bp, synthetic construct
  source 1..20: mol_type = other DNA
tcttgacaaccaaggagtga

SEQ ID NO: 11472 - DNA, 20 bp, synthetic construct
  source 1..20: mol_type = other DNA
ggatgccaccgagtaggtac

SEQ ID NO: 11473 - DNA, 20 bp, synthetic construct
  source 1..20: mol_type = other DNA
agaaggacatgtcaggtggg

SEQ ID NO: 11474 - DNA, 20 bp, synthetic construct
  source 1..20: mol_type = other DNA
gtccacgggcgtgactttgt

SEQ ID NO: 11475 - DNA, 20 bp, synthetic construct
  source 1..20: mol_type = other DNA
ttgagatcatcactggcttt

SEQ ID NO: 11476 - DNA, 20 bp, synthetic construct
  source 1..20: mol_type = other DNA
attgtgttgtcccgtggcca

SEQ ID NO: 11477 - DNA, 20 bp, synthetic construct
  source 1..20: mol_type = other DNA
aggtgtgacattactccaga

SEQ ID NO: 11478 - DNA, 20 bp, synthetic construct
  source 1..20: mol_type = other DNA
gagcaagatttcctccaggt

SEQ ID NO: 11479 - DNA, 20 bp, synthetic construct
  source 1..20: mol_type = other DNA
cctgatcagtcattttttgc

SEQ ID NO: 11480 - DNA, 20 bp, synthetic construct
  source 1..20: mol_type = other DNA
agcattcagttctgacacac

SEQ ID NO: 11481 - DNA, 20 bp, synthetic construct
  source 1..20: mol_type = other DNA
ctgttttgcaaagagctagt

SEQ ID NO: 11482 - DNA, 20 bp, synthetic construct
  source 1..20: mol_type = other DNA
tctagtgctttccaatgttg

SEQ ID NO: 11483 - DNA, 20 bp, synthetic construct
  source 1..20: mol_type = other DNA
accaggtcgtccagctcctg

SEQ ID NO: 11484 - DNA, 20 bp, synthetic construct
  source 1..20: mol_type = other DNA
tgagcgatttcatcgtcaag

SEQ ID NO: 11485 - DNA, 20 bp, synthetic construct
  source 1..20: mol_type = other DNA
gttttgagacaagtcgtagc

SEQ ID NO: 11486 - DNA, 20 bp, synthetic construct
  source 1..20: mol_type = other DNA
ctgccatattcagaactttc

SEQ ID NO: 11487 - DNA, 20 bp, synthetic construct
  source 1..20: mol_type = other DNA
ggatgcggaatttcttcagc

SEQ ID NO: 11488 - DNA, 20 bp, synthetic construct
  source 1..20: mol_type = other DNA
ccacacatggagtaaagagc

SEQ ID NO: 11489 - DNA, 20 bp, synthetic construct
  source 1..20: mol_type = other DNA
ggatgaattcagctgcacaa

SEQ ID NO: 11490 - DNA, 20 bp, synthetic construct
  source 1..20: mol_type = other DNA
tggaatggtgatctcagtta

SEQ ID NO: 11491 - DNA, 20 bp, synthetic construct
  source 1..20: mol_type = other DNA
ggtgttgacttcattcaggg

SEQ ID NO: 11492 - DNA, 20 bp, synthetic construct
  source 1..20: mol_type = other DNA
ggccatgactcgctcagcag

SEQ ID NO: 11493 - DNA, 20 bp, synthetic construct
  source 1..20: mol_type = other DNA
aattgctctggtcacttctc

SEQ ID NO: 11494 - DNA, 20 bp, synthetic construct
  source 1..20: mol_type = other DNA
tctccacgtgtttgatggcc

SEQ ID NO: 11495 - DNA, 20 bp, synthetic construct
  source 1..20: mol_type = other DNA
caagttcaagtatttctccc

SEQ ID NO: 11496 - DNA, 20 bp, synthetic construct
  source 1..20: mol_type = other DNA
tcgagagagggtgttggtca

SEQ ID NO: 11497 - DNA, 20 bp, synthetic construct
  source 1..20: mol_type = other DNA
gcctttgttgactgccatcc

SEQ ID NO: 11498 - DNA, 20 bp, synthetic construct
  source 1..20: mol_type = other DNA
cctccagtagaaatcctagt

SEQ ID NO: 11499 - DNA, 20 bp, synthetic construct
  source 1..20: mol_type = other DNA
ccaaacgtccctcaccttcc

SEQ ID NO: 11500 - DNA, 20 bp, synthetic construct
  source 1..20: mol_type = other DNA
tgtgccaagtagtagtgtga

SEQ ID NO: 11501 - DNA, 20 bp, synthetic construct
  source 1..20: mol_type = other DNA
acctagaaggcctctacctg

SEQ ID NO: 11502 - DNA, 20 bp, synthetic construct
  source 1..20: mol_type = other DNA
tttggttccaccacctttct

SEQ ID NO: 11503 - DNA, 20 bp, synthetic construct
  source 1..20: mol_type = other DNA
tttcagtccctcttttgaag

SEQ ID NO: 11504 - DNA, 20 bp, synthetic construct
  source 1..20: mol_type = other DNA
tgtccagagataagcagcca

SEQ ID NO: 11505 - DNA, 20 bp, synthetic construct
  source 1..20: mol_type = other DNA
cccgaggtttcaaaggtgaa

SEQ ID NO: 11506 - DNA, 20 bp, synthetic construct
  source 1..20: mol_type = other DNA
gaaaagtccggtcacgtcac

SEQ ID NO: 11507 - DNA, 20 bp, synthetic construct
  source 1..20: mol_type = other DNA
tcccggaactgccaggcttg

SEQ ID NO: 11508 - DNA, 20 bp, synthetic construct
  source 1..20: mol_type = other DNA
catacactgcatggtctcca

SEQ ID NO: 11509 - DNA, 20 bp, synthetic construct
  source 1..20: mol_type = other DNA
gcatatcttccagaattcct

SEQ ID NO: 11510 - DNA, 20 bp, synthetic construct
  source 1..20: mol_type = other DNA
tatagtcactcattcctcct

SEQ ID NO: 11511 - DNA, 20 bp, synthetic construct
  source 1..20: mol_type = other DNA
attctccttggtcttggctc

SEQ ID NO: 11512 - DNA, 20 bp, synthetic construct
  source 1..20: mol_type = other DNA
tgatctcaccaatgtccacg

SEQ ID NO: 11513 - DNA, 20 bp, synthetic construct
  source 1..20: mol_type = other DNA
cttaccaccaaccaccctgg

SEQ ID NO: 11514 - DNA, 20 bp, synthetic construct
  source 1..20: mol_type = other DNA
ctccgaatggcgaggaagac

SEQ ID NO: 11515 - DNA, 20 bp, synthetic construct
  source 1..20: mol_type = other DNA
gcatgccaacattcaagcct

SEQ ID NO: 11516 - DNA, 20 bp, synthetic construct
  source 1..20: mol_type = other DNA
tacagaagcccaaagtgcat

SEQ ID NO: 11517 - DNA, 20 bp, synthetic construct
  source 1..20: mol_type = other DNA
ccatcatccgccttgaatgc

SEQ ID NO: 11518 - DNA, 20 bp, synthetic construct
  source 1..20: mol_type = other DNA
tctggtccactaggcaggcc

SEQ ID NO: 11519 - DNA, 20 bp, synthetic construct
  source 1..20: mol_type = other DNA
aaatccctaagtcactcgcc

SEQ ID NO: 11520 - DNA, 20 bp, synthetic construct
  source 1..20: mol_type = other DNA
taacagcctactctgggagc

SEQ ID NO: 11521 - DNA, 20 bp, synthetic construct
  source 1..20: mol_type = other DNA
cgggttcattttgcagcgat

SEQ ID NO: 11522 - DNA, 20 bp, synthetic construct
  source 1..20: mol_type = other DNA
atcgatttggacatgctgtt

SEQ ID NO: 11523 - DNA, 20 bp, synthetic construct
  source 1..20: mol_type = other DNA
agtggactcctgctttgcct

SEQ ID NO: 11524 - DNA, 20 bp, synthetic construct
  source 1..20: mol_type = other DNA
ccatcaaaggtcacgatgtg

SEQ ID NO: 11525 - DNA, 20 bp, synthetic construct
  source 1..20: mol_type = other DNA
acatgcattgcttcagaaga

SEQ ID NO: 11526 - DNA, 20 bp, synthetic construct
  source 1..20: mol_type = other DNA
ttagtgtgtacaaggctgaa

SEQ ID NO: 11527 - DNA, 20 bp, synthetic construct
  source 1..20: mol_type = other DNA
gtccataggcatcgtcctca

SEQ ID NO: 11528 - DNA, 20 bp, synthetic construct
  source 1..20: mol_type = other DNA
agcttccttgcaatctccct

SEQ ID NO: 11529 - DNA, 20 bp, synthetic construct
  source 1..20: mol_type = other DNA
gcccatcattcttggtcact

SEQ ID NO: 11530 - DNA, 20 bp, synthetic construct
  source 1..20: mol_type = other DNA
tcctttgcagttttggtcta

SEQ ID NO: 11531 - DNA, 20 bp, synthetic construct
  source 1..20: mol_type = other DNA
gttataacagcaggtgactg

SEQ ID NO: 11532 - DNA, 20 bp, synthetic construct
  source 1..20: mol_type = other DNA
agaaatactccttgatgtgg

SEQ ID NO: 11533 - DNA, 20 bp, synthetic construct
  source 1..20: mol_type = other DNA
gtaagttcaggttcaaggac

SEQ ID NO: 11534 - DNA, 20 bp, synthetic construct
  source 1..20: mol_type = other DNA
tttatgacagggagcaccgt

SEQ ID NO: 11535 - DNA, 20 bp, synthetic construct
  source 1..20: mol_type = other DNA
acccactcatttgcagcaga

SEQ ID NO: 11536 - DNA, 20 bp, synthetic construct
  source 1..20: mol_type = other DNA
gatccaactcaaattccttc

SEQ ID NO: 11537 - DNA, 20 bp, synthetic construct
  source 1..20: mol_type = other DNA
atgctgcacgaatacctccc

SEQ ID NO: 11538 - DNA, 20 bp, synthetic construct
  source 1..20: mol_type = other DNA
atcgttgcggaacttgacgc

SEQ ID NO: 11539 - DNA, 20 bp, synthetic construct
  source 1..20: mol_type = other DNA
tatccagatgcccacacagg

SEQ ID NO: 11540 - DNA, 20 bp, synthetic construct
  source 1..20: mol_type = other DNA
taggttgagaccgccggcat

SEQ ID NO: 11541 - DNA, 20 bp, synthetic construct
  source 1..20: mol_type = other DNA
gagcgctagggtttacggtg

SEQ ID NO: 11542 - DNA, 20 bp, synthetic construct
  source 1..20: mol_type = other DNA
atgcgggattcttttccatt

SEQ ID NO: 11543 - DNA, 20 bp, synthetic construct
  source 1..20: mol_type = other DNA
actaagttctctcctcttga

SEQ ID NO: 11544 - DNA, 20 bp, synthetic construct
  source 1..20: mol_type = other DNA
aacattccaccggaacagct

SEQ ID NO: 11545 - DNA, 20 bp, synthetic construct
  source 1..20: mol_type = other DNA
aggtggaatgacatggtcag

SEQ ID NO: 11546 - DNA, 20 bp, synthetic construct
  source 1..20: mol_type = other DNA
cagttgctcctgttcattcc

SEQ ID NO: 11547 - DNA, 20 bp, synthetic construct
  source 1..20: mol_type = other DNA
tttagccaaggctatctcag

SEQ ID NO: 11548 - DNA, 20 bp, synthetic construct
  source 1..20: mol_type = other DNA
cccttaaagagtgcagggac

SEQ ID NO: 11549 - DNA, 20 bp, synthetic construct
  source 1..20: mol_type = other DNA
cctctcttcgtcctagattg

SEQ ID NO: 11550 - DNA, 20 bp, synthetic construct
  source 1..20: mol_type = other DNA
gaattaccaagtgagtcctt

SEQ ID NO: 11551 - DNA, 20 bp, synthetic construct
  source 1..20: mol_type = other DNA
catctgtagattcaatgcct

SEQ ID NO: 11552 - DNA, 20 bp, synthetic construct
  source 1..20: mol_type = other DNA
ggcactctgtcacgtgtaca

SEQ ID NO: 11553 - DNA, 20 bp, synthetic construct
  source 1..20: mol_type = other DNA
cttagaaggtccgggaaata

SEQ ID NO: 11554 - DNA, 20 bp, synthetic construct
  source 1..20: mol_type = other DNA
atgctactaaatgtcaggga

SEQ ID NO: 11555 - DNA, 20 bp, synthetic construct
  source 1..20: mol_type = other DNA
ctgcttgtagtgagacccag

SEQ ID NO: 11556 - DNA, 20 bp, synthetic construct
  source 1..20: mol_type = other DNA
atacaagtccaggagatctt

SEQ ID NO: 11557 - DNA, 20 bp, synthetic construct
  source 1..20: mol_type = other DNA
ggttctagagtgccagggat

SEQ ID NO: 11558 - DNA, 20 bp, synthetic construct
  source 1..20: mol_type = other DNA
agaccacaatcctccttaat

SEQ ID NO: 11559 - DNA, 20 bp, synthetic construct
  source 1..20: mol_type = other DNA
ctctggtggcttgcaacatc

SEQ ID NO: 11560 - DNA, 20 bp, synthetic construct
  source 1..20: mol_type = other DNA
aaatagccagtgatgcccaa

SEQ ID NO: 11561 - DNA, 20 bp, synthetic construct
  source 1..20: mol_type = other DNA
gcaaattatggacttccaca

SEQ ID NO: 11562 - DNA, 20 bp, synthetic construct
  source 1..20: mol_type = other DNA
cttttatggtgggatcctgg

SEQ ID NO: 11563 - DNA, 20 bp, synthetic construct
  source 1..20: mol_type = other DNA
atattcctcgtgggtccagg

SEQ ID NO: 11564 - DNA, 20 bp, synthetic construct
  source 1..20: mol_type = other DNA
cacttgacgagacccaacat

SEQ ID NO: 11565 - DNA, 20 bp, synthetic construct
  source 1..20: mol_type = other DNA
gacaattgtggccaccgaca

SEQ ID NO: 11566 - DNA, 20 bp, synthetic construct
  source 1..20: mol_type = other DNA
atggaatactttgggatggg

SEQ ID NO: 11567 - DNA, 20 bp, synthetic construct
  source 1..20: mol_type = other DNA
agtaagccaaaggacgtgaa

SEQ ID NO: 11568 - DNA, 20 bp, synthetic construct
  source 1..20: mol_type = other DNA
ctcgaagcttcccgattgga

SEQ ID NO: 11569 - DNA, 20 bp, synthetic construct
  source 1..20: mol_type = other DNA
tcaccgcaaggaaggcattc

SEQ ID NO: 11570 - DNA, 20 bp, synthetic construct
  source 1..20: mol_type = other DNA
agcgttatactatgactgga

SEQ ID NO: 11571 - DNA, 20 bp, synthetic construct
  source 1..20: mol_type = other DNA
gaagctctgagaattactct

SEQ ID NO: 11572 - DNA, 20 bp, synthetic construct
  source 1..20: mol_type = other DNA
ttgaactccaccttcttctg

SEQ ID NO: 11573 - DNA, 20 bp, synthetic construct
  source 1..20: mol_type = other DNA
atcaatcatctagcctctct

SEQ ID NO: 11574 - DNA, 20 bp, synthetic construct
  source 1..20: mol_type = other DNA
agtgtttcgggaaggcaaaa

SEQ ID NO: 11575 - DNA, 20 bp, synthetic construct
  source 1..20: mol_type = other DNA
ccatgtagatgccatcacga

SEQ ID NO: 11576 - DNA, 20 bp, synthetic construct
  source 1..20: mol_type = other DNA
tgttgccatacttggtggca

SEQ ID NO: 11577 - DNA, 20 bp, synthetic construct
  source 1..20: mol_type = other DNA
aacccacattgaaggtactg

SEQ ID NO: 11578 - DNA, 20 bp, synthetic construct
  source 1..20: mol_type = other DNA
gtatgactcgttgccctcct

SEQ ID NO: 11579 - DNA, 20 bp, synthetic construct
  source 1..20: mol_type = other DNA
gccaacaatttggacccaag

SEQ ID NO: 11580 - DNA, 20 bp, synthetic construct
  source 1..20: mol_type = other DNA
ggttcttgtactcgggccat

SEQ ID NO: 11581 - DNA, 20 bp, synthetic construct
  source 1..20: mol_type = other DNA
atcagggaatgaaacagaca

SEQ ID NO: 11582 - DNA, 20 bp, synthetic construct
  source 1..20: mol_type = other DNA
tactagctcactcaggcttt

SEQ ID NO: 11583 - DNA, 20 bp, synthetic construct
  source 1..20: mol_type = other DNA
ccgagcagaaatagtagccc

SEQ ID NO: 11584 - DNA, 20 bp, synthetic construct
  source 1..20: mol_type = other DNA
gcggttgtcgccttccagcc

SEQ ID NO: 11585 - DNA, 20 bp, synthetic construct
  source 1..20: mol_type = other DNA
tgcaagttcatagacagtcc

SEQ ID NO: 11586 - DNA, 20 bp, synthetic construct
  source 1..20: mol_type = other DNA
attatctagcattgcatgcc

SEQ ID NO: 11587 - DNA, 20 bp, synthetic construct
  source 1..20: mol_type = other DNA
ggtgtatatttcttcctcgt

SEQ ID NO: 11588 - DNA, 20 bp, synthetic construct
  source 1..20: mol_type = other DNA
tcattccgggctttaaacaa

SEQ ID NO: 11589 - DNA, 20 bp, synthetic construct
  source 1..20: mol_type = other DNA
ctggctctgaatgaacttgg

SEQ ID NO: 11590 - DNA, 20 bp, synthetic construct
  source 1..20: mol_type = other DNA
caagtcaactcagataccac

SEQ ID NO: 11591 - DNA, 20 bp, synthetic construct
  source 1..20: mol_type = other DNA
tttgaacccacacagaatca

SEQ ID NO: 11592 - DNA, 20 bp, synthetic construct
  source 1..20: mol_type = other DNA
gagtgcattcccattgaatg

SEQ ID NO: 11593 - DNA, 20 bp, synthetic construct
  source 1..20: mol_type = other DNA
ccctgactttatgcctacaa

SEQ ID NO: 11594 - DNA, 20 bp, synthetic construct
  source 1..20: mol_type = other DNA
ggttggaaaagtctttccaa

SEQ ID NO: 11595 - DNA, 20 bp, synthetic construct
  source 1..20: mol_type = other DNA
gtctttgagggctcattcaa

SEQ ID NO: 11596 - DNA, 20 bp, synthetic construct
  source 1..20: mol_type = other DNA
gaaaacttcttggacgcttt

SEQ ID NO: 11597 - DNA, 20 bp, synthetic construct
  source 1..20: mol_type = other DNA
gcagagatgatggacgtcag

SEQ ID NO: 11598 - DNA, 20 bp, synthetic construct
  source 1..20: mol_type = other DNA
atttgccaatttccaggaag

SEQ ID NO: 11599 - DNA, 20 bp, synthetic construct
  source 1..20: mol_type = other DNA
agggaggcgtagtagaccgt

SEQ ID NO: 11600 - DNA, 20 bp, synthetic construct
  source 1..20: mol_type = other DNA
gggtgcagtttatttccact

SEQ ID NO: 11601 - DNA, 20 bp, synthetic construct
  source 1..20: mol_type = other DNA
gcacctgtagatccctgaga

SEQ ID NO: 11602 - DNA, 20 bp, synthetic construct
  source 1..20: mol_type = other DNA
tcaaatgggatgtgtgctga

SEQ ID NO: 11603 - DNA, 20 bp, synthetic construct
  source 1..20: mol_type = other DNA
aagccagtgatcgtctcagt

SEQ ID NO: 11604 - DNA, 20 bp, synthetic construct
  source 1..20: mol_type = other DNA
acatcggtcacttgcatctg

SEQ ID NO: 11605 - DNA, 20 bp, synthetic construct
  source 1..20: mol_type = other DNA
gtggtagatctcattgagtg

SEQ ID NO: 11606 - DNA, 20 bp, synthetic construct
  source 1..20: mol_type = other DNA
gacagttcgcacaggacgtc

SEQ ID NO: 11607 - DNA, 20 bp, synthetic construct
  source 1..20: mol_type = other DNA
gcacaaccaccttaggccaa

SEQ ID NO: 11608 - DNA, 20 bp, synthetic construct
  source 1..20: mol_type = other DNA
caccctgttttatgggcagg

SEQ ID NO: 11609 - DNA, 20 bp, synthetic construct
  source 1..20: mol_type = other DNA
acactttattctcgtgagag

SEQ ID NO: 11610 - DNA, 20 bp, synthetic construct
  source 1..20: mol_type = other DNA
agtagttgtccaaactgaag

SEQ ID NO: 11611 - DNA, 20 bp, synthetic construct
  source 1..20: mol_type = other DNA
catcaggcatactgtaaagt

SEQ ID NO: 11612 - DNA, 20 bp, synthetic construct
  source 1..20: mol_type = other DNA
ttttcaaggccaaaggaagt

SEQ ID NO: 11613 - DNA, 20 bp, synthetic construct
  source 1..20: mol_type = other DNA
accaagatgcactattgtga

SEQ ID NO: 11614 - DNA, 20 bp, synthetic construct
  source 1..20: mol_type = other DNA
cactttcgatcttcctgcac

SEQ ID NO: 11615 - DNA, 20 bp, synthetic construct
  source 1..20: mol_type = other DNA
ctgaacaaaggccatgtagg

SEQ ID NO: 11616 - DNA, 20 bp, synthetic construct
  source 1..20: mol_type = other DNA
acagtgacttctcgcagggt

SEQ ID NO: 11617 - DNA, 20 bp, synthetic construct
  source 1..20: mol_type = other DNA
tgtagtaactttggctgttg

SEQ ID NO: 11618 - DNA, 20 bp, synthetic construct
  source 1..20: mol_type = other DNA
gtttgagctctaacatccat

SEQ ID NO: 11619 - DNA, 20 bp, synthetic construct
  source 1..20: mol_type = other DNA
accgacctccgctctgtatt

SEQ ID NO: 11620 - DNA, 20 bp, synthetic construct
  source 1..20: mol_type = other DNA
ttcttcaagtcacaaaggga

SEQ ID NO: 11621 - DNA, 20 bp, synthetic construct
  source 1..20: mol_type = other DNA
ggagcaatcgaagaggcata

SEQ ID NO: 11622 - DNA, 20 bp, synthetic construct
  source 1..20: mol_type = other DNA
tggaaaatctcatcaccatc

SEQ ID NO: 11623 - DNA, 20 bp, synthetic construct
  source 1..20: mol_type = other DNA
atgaattggcggcggcggtg

SEQ ID NO: 11624 - DNA, 20 bp, synthetic construct
  source 1..20: mol_type = other DNA
tcccgttcttgcatttgcat

SEQ ID NO: 11625 - DNA, 20 bp, synthetic construct
  source 1..20: mol_type = other DNA
ttcttgtagtctgctcctct

SEQ ID NO: 11626 - DNA, 20 bp, synthetic construct
  source 1..20: mol_type = other DNA
aggttggctgcctagttggc

SEQ ID NO: 11627 - DNA, 20 bp, synthetic construct
  source 1..20: mol_type = other DNA
tcttttggatgctctggtca

SEQ ID NO: 11628 - DNA, 20 bp, synthetic construct
  source 1..20: mol_type = other DNA
agttatcaagcatgccagga

SEQ ID NO: 11629 - DNA, 20 bp, synthetic construct
  source 1..20: mol_type = other DNA
aagtgatggagtcgggaagg

SEQ ID NO: 11630 - DNA, 20 bp, synthetic construct
  source 1..20: mol_type = other DNA
ggtgctggactttgcacacc

SEQ ID NO: 11631 - DNA, 20 bp, synthetic construct
  source 1..20: mol_type = other DNA
cggcgccgcacatacagctg

SEQ ID NO: 11632 - DNA, 20 bp, synthetic construct
  source 1..20: mol_type = other DNA
cactgcggtaaggtcatagg

SEQ ID NO: 11633 - DNA, 20 bp, synthetic construct
  source 1..20: mol_type = other DNA
gtaaccctaagggcaggagc

SEQ ID NO: 11634 - DNA, 20 bp, synthetic construct
  source 1..20: mol_type = other DNA
aggacagcttggttctagcg

SEQ ID NO: 11635 - DNA, 20 bp, synthetic construct
  source 1..20: mol_type = other DNA
acttaaagttcgttctgccc

SEQ ID NO: 11636 - DNA, 20 bp, synthetic construct
  source 1..20: mol_type = other DNA
gtagtaatctgaggaccttt

SEQ ID NO: 11637 - DNA, 20 bp, synthetic construct
  source 1..20: mol_type = other DNA
tcagttatatcctggccgcc

SEQ ID NO: 11638 - DNA, 20 bp, synthetic construct
  source 1..20: mol_type = other DNA
tctctggcgggtcatcgtca

SEQ ID NO: 11639 - DNA, 20 bp, synthetic construct
  source 1..20: mol_type = other DNA
tggttgcagccatttctgtc

SEQ ID NO: 11640 - DNA, 20 bp, synthetic construct
  source 1..20: mol_type = other DNA
tctcgagttgtagaagcatg

SEQ ID NO: 11641 - DNA, 20 bp, synthetic construct
  source 1..20: mol_type = other DNA
ggcatcctctcttcaccggc

SEQ ID NO: 11642 - DNA, 20 bp, synthetic construct
  source 1..20: mol_type = other DNA
ttggaaggttcaggttgttt

SEQ ID NO: 11643 - DNA, 20 bp, synthetic construct
  source 1..20: mol_type = other DNA
ctagactaggttgtccctcc

SEQ ID NO: 11644 - DNA, 20 bp, synthetic construct
  source 1..20: mol_type = other DNA
gagctttctctgcaggagtg

SEQ ID NO: 11645 - DNA, 20 bp, synthetic construct
  source 1..20: mol_type = other DNA
actttacctccacgagggcc

SEQ ID NO: 11646 - DNA, 20 bp, synthetic construct
  source 1..20: mol_type = other DNA
ccttcccatccacgtttgtt

SEQ ID NO: 11647 - DNA, 20 bp, synthetic construct
  source 1..20: mol_type = other DNA
cgggttcttaaggccgccgg

SEQ ID NO: 11648 - DNA, 20 bp, synthetic construct
  source 1..20: mol_type = other DNA
agaggttgcctttgagggta

SEQ ID NO: 11649 - DNA, 20 bp, synthetic construct
  source 1..20: mol_type = other DNA
actctggtcatgttgatgaa

SEQ ID NO: 11650 - DNA, 20 bp, synthetic construct
  source 1..20: mol_type = other DNA
cgccaggaagtcagatgctg

SEQ ID NO: 11651 - DNA, 20 bp, synthetic construct
  source 1..20: mol_type = other DNA
aaagcgcctgtactcccgga

SEQ ID NO: 11652 - DNA, 20 bp, synthetic construct
  source 1..20: mol_type = other DNA
tccggaaatcagctgcttcc

SEQ ID NO: 11653 - DNA, 20 bp, synthetic construct
  source 1..20: mol_type = other DNA
atctggttctcaatggtgag

SEQ ID NO: 11654 - DNA, 20 bp, synthetic construct
  source 1..20: mol_type = other DNA
gtcatggccgcatctgactt

SEQ ID NO: 11655 - DNA, 20 bp, synthetic construct
  source 1..20: mol_type = other DNA
agtacacagaactagacaca

SEQ ID NO: 11656 - DNA, 20 bp, synthetic construct
  source 1..20: mol_type = other DNA
aggagaataatcccagcaca

SEQ ID NO: 11657 - DNA, 20 bp, synthetic construct
  source 1..20: mol_type = other DNA
agagatcagtaatgggaagc

SEQ ID NO: 11658 - DNA, 20 bp, synthetic construct
  source 1..20: mol_type = other DNA
gtaagagagtccaatccagt

SEQ ID NO: 11659 - DNA, 20 bp, synthetic construct
  source 1..20: mol_type = other DNA
atccaatccagcctgctgag

SEQ ID NO: 11660 - DNA, 20 bp, synthetic construct
  source 1..20: mol_type = other DNA
ttttagatctccagtgtcct

SEQ ID NO: 11661 - DNA, 20 bp, synthetic construct
  source 1..20: mol_type = other DNA
aactataggacatgatgcct

SEQ ID NO: 11662 - DNA, 20 bp, synthetic construct
  source 1..20: mol_type = other DNA
agccatctctgtaggtgagg

SEQ ID NO: 11663 - DNA, 20 bp, synthetic construct
  source 1..20: mol_type = other DNA
gcgtacactgtcaagggagt

SEQ ID NO: 11664 - DNA, 20 bp, synthetic construct
  source 1..20: mol_type = other DNA
gggatccagaatgctggcta

SEQ ID NO: 11665 - DNA, 20 bp, synthetic construct
  source 1..20: mol_type = other DNA
accggactgttatttatcca

SEQ ID NO: 11666 - DNA, 20 bp, synthetic construct
  source 1..20: mol_type = other DNA
agctgctacaatggctacat

SEQ ID NO: 11667 - DNA, 20 bp, synthetic construct
  source 1..20: mol_type = other DNA
atgagccgccttggattttc

SEQ ID NO: 11668 - DNA, 20 bp, synthetic construct
  source 1..20: mol_type = other DNA
tactcagcattccagtccag

SEQ ID NO: 11669 - DNA, 20 bp, synthetic construct
  source 1..20: mol_type = other DNA
cagtagaaggtcaccttctc

SEQ ID NO: 11670 - DNA, 20 bp, synthetic construct
  source 1..20: mol_type = other DNA
tcaaaactcatcttgccgct

SEQ ID NO: 11671 - DNA, 20 bp, synthetic construct
  source 1..20: mol_type = other DNA
attccagaacacacagctga

SEQ ID NO: 11672 - DNA, 20 bp, synthetic construct
  source 1..20: mol_type = other DNA
tgtacagttccttagggact

SEQ ID NO: 11673 - DNA, 20 bp, synthetic construct
  source 1..20: mol_type = other DNA
tttggaactggccggctggc

SEQ ID NO: 11674 - DNA, 20 bp, synthetic construct
  source 1..20: mol_type = other DNA
cacatctgtcatagataagc

SEQ ID NO: 11675 - DNA, 20 bp, synthetic construct
  source 1..20: mol_type = other DNA
ttgtagagctgagtcttctc

SEQ ID NO: 11676 - DNA, 20 bp, synthetic construct
  source 1..20: mol_type = other DNA
gtcattggtgtagatttcac

SEQ ID NO: 11677 - DNA, 20 bp, synthetic construct
  source 1..20: mol_type = other DNA
cgcatccagttgcttttctc

SEQ ID NO: 11678 - DNA, 20 bp, synthetic construct
  source 1..20: mol_type = other DNA
gacagggtgaatcgggatta

SEQ ID NO: 11679 - DNA, 20 bp, synthetic construct
  source 1..20: mol_type = other DNA
ggaggtgtgatggccgccaa

SEQ ID NO: 11680 - DNA, 20 bp, synthetic construct
  source 1..20: mol_type = other DNA
atcgcacttatactggtcaa

SEQ ID NO: 11681 - DNA, 20 bp, synthetic construct
  source 1..20: mol_type = other DNA
agtcatcgtcttgcactctg

SEQ ID NO: 11682 - DNA, 20 bp, synthetic construct
  source 1..20: mol_type = other DNA
ctgagcagatgaaggtacat

SEQ ID NO: 11683 - DNA, 20 bp, synthetic construct
  source 1..20: mol_type = other DNA
caatttccgccttgttttgt

SEQ ID NO: 11684 - DNA, 20 bp, synthetic construct
  source 1..20: mol_type = other DNA
atgggcacgaagcctgtggt

SEQ ID NO: 11685 - DNA, 20 bp, synthetic construct
  source 1..20: mol_type = other DNA
ttctgatcactctttgccac

SEQ ID NO: 11686 - DNA, 20 bp, synthetic construct
  source 1..20: mol_type = other DNA
tcatagacatctggattggg

SEQ ID NO: 11687 - DNA, 20 bp, synthetic construct
  source 1..20: mol_type = other DNA
acttcagagggttttcagga

SEQ ID NO: 11688 - DNA, 20 bp, synthetic construct
  source 1..20: mol_type = other DNA
cagagtggaatctcacttcc

SEQ ID NO: 11689 - DNA, 20 bp, synthetic construct
  source 1..20: mol_type = other DNA
cagactttactgcagcagct

SEQ ID NO: 11690 - DNA, 20 bp, synthetic construct
  source 1..20: mol_type = other DNA
agattcccgcacctgcactt

SEQ ID NO: 11691 - DNA, 20 bp, synthetic construct
  source 1..20: mol_type = other DNA
ccgctctggtaccgccagtg

SEQ ID NO: 11692 - DNA, 20 bp, synthetic construct
  source 1..20: mol_type = other DNA
tgtagttagggcagaggatg

SEQ ID NO: 11693 - DNA, 20 bp, synthetic construct
  source 1..20: mol_type = other DNA
cagggtagagctgccacatg

SEQ ID NO: 11694 - DNA, 20 bp, synthetic construct
  source 1..20: mol_type = other DNA
actagtgctgtgagggacag

SEQ ID NO: 11695 - DNA, 20 bp, synthetic construct
  source 1..20: mol_type = other DNA
gagcctcagcagacgcagct

SEQ ID NO: 11696 - DNA, 20 bp, synthetic construct
  source 1..20: mol_type = other DNA
caatggaatctggaacctgg

SEQ ID NO: 11697 - DNA, 20 bp, synthetic construct
  source 1..20: mol_type = other DNA
accagtaaatccaacctccc

SEQ ID NO: 11698 - DNA, 20 bp, synthetic construct
  source 1..20: mol_type = other DNA
acggtacatccacgtagttt

SEQ ID NO: 11699 - DNA, 20 bp, synthetic construct
  source 1..20: mol_type = other DNA
tagagatctcacagaaccaa

SEQ ID NO: 11700 - DNA, 20 bp, synthetic construct
  source 1..20: mol_type = other DNA
gagactggacaagccattga

SEQ ID NO: 11701 - DNA, 20 bp, synthetic construct
  source 1..20: mol_type = other DNA
ccatcttcaattgtctggat

SEQ ID NO: 11702 - DNA, 20 bp, synthetic construct
  source 1..20: mol_type = other DNA
gttcctttcactgaattggt

SEQ ID NO: 11703 - DNA, 20 bp, synthetic construct
  source 1..20: mol_type = other DNA
cattaagctcccaacagtaa

SEQ ID NO: 11704 - DNA, 20 bp, synthetic construct
  source 1..20: mol_type = other DNA
cgttgtagaagcccggcccg

SEQ ID NO: 11705 - DNA, 20 bp, synthetic construct
  source 1..20: mol_type = other DNA
gggactgcaaatctgattcc

SEQ ID NO: 11706 - DNA, 20 bp, synthetic construct
  source 1..20: mol_type = other DNA
caaagctgattccaagagaa

SEQ ID NO: 11707 - DNA, 20 bp, synthetic construct
  source 1..20: mol_type = other DNA
acggcacgcttatttctgct

SEQ ID NO: 11708 - DNA, 20 bp, synthetic construct
  source 1..20: mol_type = other DNA
agtaaattatggatgccacg

SEQ ID NO: 11709 - DNA, 20 bp, synthetic construct
  source 1..20: mol_type = other DNA
ctcggtgaagggagtccggc

SEQ ID NO: 11710 - DNA, 20 bp, synthetic construct
  source 1..20: mol_type = other DNA
gtgagaggaagagaacctgc

SEQ ID NO: 11711 - DNA, 20 bp, synthetic construct
  source 1..20: mol_type = other DNA
cctaaggtccacttgtgtca

SEQ ID NO: 11712 - DNA, 20 bp, synthetic construct
  source 1..20: mol_type = other DNA
gtataggcgccatctataga

SEQ ID NO: 11713 - DNA, 20 bp, synthetic construct
  source 1..20: mol_type = other DNA
ttcgttcccaaaactaacag

SEQ ID NO: 11714 - DNA, 20 bp, synthetic construct
  source 1..20: mol_type = other DNA
ttcagtgcgacgccgcgagc

SEQ ID NO: 11715 - DNA, 20 bp, synthetic construct
  source 1..20: mol_type = other DNA
tcttcgccgggacatctgcc

SEQ ID NO: 11716 - DNA, 20 bp, synthetic construct
  source 1..20: mol_type = other DNA
gtcagctatgaaattctgtg

SEQ ID NO: 11717 - DNA, 20 bp, synthetic construct
  source 1..20: mol_type = other DNA
gacaggacagtcacgcagag

SEQ ID NO: 11718 - DNA, 20 bp, synthetic construct
  source 1..20: mol_type = other DNA
ccatgtagctcaggtagaca

SEQ ID NO: 11719 - DNA, 20 bp, synthetic construct
  source 1..20: mol_type = other DNA
gatgcattctgagccgagaa

SEQ ID NO: 11720 - DNA, 20 bp, synthetic construct
  source 1..20: mol_type = other DNA
tttcagaatggtgaggttag

SEQ ID NO: 11721 - DNA, 20 bp, synthetic construct
  source 1..20: mol_type = other DNA
cactggagctggaaatagct

SEQ ID NO: 11722 - DNA, 20 bp, synthetic construct
  source 1..20: mol_type = other DNA
acagtctctgaagacacatt

SEQ ID NO: 11723 - DNA, 20 bp, synthetic construct
  source 1..20: mol_type = other DNA
aaacagagacagctaaagct

SEQ ID NO: 11724 - DNA, 20 bp, synthetic construct
  source 1..20: mol_type = other DNA
ctcactggtttgccaatata

SEQ ID NO: 11725 - DNA, 20 bp, synthetic construct
  source 1..20: mol_type = other DNA
ctgacttccttctcctgagt

SEQ ID NO: 11726 - DNA, 20 bp, synthetic construct
  source 1..20: mol_type = other DNA
tcccacttgagggcgtccag

SEQ ID NO: 11727 - DNA, 20 bp, synthetic construct
  source 1..20: mol_type = other DNA
attatgcacctccacgccgt

SEQ ID NO: 11728 - DNA, 20 bp, synthetic construct
  source 1..20: mol_type = other DNA
accctctttgtcgtcttgcc

SEQ ID NO: 11729 - DNA, 20 bp, synthetic construct
  source 1..20: mol_type = other DNA
caagaagcctggctctcata

SEQ ID NO: 11730 - DNA, 20 bp, synthetic construct
  source 1..20: mol_type = other DNA
cttgtggataaaagccttct

SEQ ID NO: 11731 - DNA, 20 bp, synthetic construct
  source 1..20: mol_type = other DNA
gggcctctttatagcgacag

SEQ ID NO: 11732 - DNA, 20 bp, synthetic construct
  source 1..20: mol_type = other DNA
tggcatttaaaggaagccag

SEQ ID NO: 11733 - DNA, 20 bp, synthetic construct
  source 1..20: mol_type = other DNA
atgaataggaagcgcagggc

SEQ ID NO: 11734 - DNA, 20 bp, synthetic construct
  source 1..20: mol_type = other DNA
acgaaggcatcgtagggcag

SEQ ID NO: 11735 - DNA, 20 bp, synthetic construct
  source 1..20: mol_type = other DNA
gtcatagagcttaagcgtct

SEQ ID NO: 11736 - DNA, 20 bp, synthetic construct
  source 1..20: mol_type = other DNA
ggtatcttctgaacttctcc

SEQ ID NO: 11737 - DNA, 20 bp, synthetic construct
  source 1..20: mol_type = other DNA
caaatcagaatggcagtttg

SEQ ID NO: 11738 - DNA, 20 bp, synthetic construct
  source 1..20: mol_type = other DNA
ccttggaagatgggaaaggt

SEQ ID NO: 11739 - DNA, 20 bp, synthetic construct
  source 1..20: mol_type = other DNA
tacattatggaggctttctc

SEQ ID NO: 11740 - DNA, 20 bp, synthetic construct
  source 1..20: mol_type = other DNA
ttataagggcttgactccag

SEQ ID NO: 11741 - DNA, 20 bp, synthetic construct
  source 1..20: mol_type = other DNA
tgtaatagacctccagaaca

SEQ ID NO: 11742 - DNA, 20 bp, synthetic construct
  source 1..20: mol_type = other DNA
gtgaagaagcttgagtttgc

SEQ ID NO: 11743 - DNA, 20 bp, synthetic construct
  source 1..20: mol_type = other DNA
tggttggtgctgatgcagga

SEQ ID NO: 11744 - DNA, 20 bp, synthetic construct
  source 1..20: mol_type = other DNA
ttggattttgagcctgagaa

SEQ ID NO: 11745 - DNA, 20 bp, synthetic construct
  source 1..20: mol_type = other DNA
gcgggaagacgatggctgcc

SEQ ID NO: 11746 - DNA, 20 bp, synthetic construct
  source 1..20: mol_type = other DNA
tggccacgtctaccctgctt

SEQ ID NO: 11747 - DNA, 20 bp, synthetic construct
  source 1..20: mol_type = other DNA
accaggatgaccaatccatt

SEQ ID NO: 11748 - DNA, 20 bp, synthetic construct
  source 1..20: mol_type = other DNA
cactgacgttggcaaagatg

SEQ ID NO: 11749 - DNA, 20 bp, synthetic construct
  source 1..20: mol_type = other DNA
ctcctaaactgaggtcagac

SEQ ID NO: 11750 - DNA, 20 bp, synthetic construct
  source 1..20: mol_type = other DNA
ccttcagcctcgccagggtg

SEQ ID NO: 11751 - DNA, 20 bp, synthetic construct
  source 1..20: mol_type = other DNA
atgcctgcataggcccagaa

SEQ ID NO: 11752 - DNA, 20 bp, synthetic construct
  source 1..20: mol_type = other DNA
gcctaaccagccaggcgtgg

SEQ ID NO: 11753 - DNA, 20 bp, synthetic construct
  source 1..20: mol_type = other DNA
ttgcggacgccgtcttcctc

SEQ ID NO: 11754 - DNA, 20 bp, synthetic construct
  source 1..20: mol_type = other DNA
gttatgttcaggctgacgac

SEQ ID NO: 11755 - DNA, 20 bp, synthetic construct
  source 1..20: mol_type = other DNA
tatggtttgcctcttgtact

SEQ ID NO: 11756 - DNA, 20 bp, synthetic construct
  source 1..20: mol_type = other DNA
agcgcgattgaagtgctccg

SEQ ID NO: 11757 - DNA, 20 bp, synthetic construct
  source 1..20: mol_type = other DNA
acgcgttgtaagaataccct

SEQ ID NO: 11758 - DNA, 20 bp, synthetic construct
  source 1..20: mol_type = other DNA
cgcagtttaaggtacgtcgc

SEQ ID NO: 11759 - DNA, 20 bp, synthetic construct
  source 1..20: mol_type = other DNA
tgttgcagacaattgtcagg

SEQ ID NO: 11760 - DNA, 20 bp, synthetic construct
  source 1..20: mol_type = other DNA
agcacccgcggaccggaaaa

SEQ ID NO: 11761 - DNA, 20 bp, synthetic construct
  source 1..20: mol_type = other DNA
cctcttcattgtcgaaagat

SEQ ID NO: 11762 - DNA, 20 bp, synthetic construct
  source 1..20: mol_type = other DNA
cgtagcgtgatggtcttata

SEQ ID NO: 11763 - DNA, 20 bp, synthetic construct
  source 1..20: mol_type = other DNA
gcttgtagttttcacagaca

SEQ ID NO: 11764 - DNA, 20 bp, synthetic construct
  source 1..20: mol_type = other DNA
agcaggcacatgtacttttt

SEQ ID NO: 11765 - DNA, 20 bp, synthetic construct
  source 1..20: mol_type = other DNA
gcgttgatcactggcaactg

SEQ ID NO: 11766 - DNA, 20 bp, synthetic construct
  source 1..20: mol_type = other DNA
agggtgtccagatgagaaga

SEQ ID NO: 11767 - DNA, 20 bp, synthetic construct
  source 1..20: mol_type = other DNA
ccaggcccacaggatattca

SEQ ID NO: 11768 - DNA, 20 bp, synthetic construct
  source 1..20: mol_type = other DNA
atgtcccggacaatctcacg

SEQ ID NO: 11769 - DNA, 20 bp, synthetic construct
  source 1..20: mol_type = other DNA
tatgagcatcaggagagaca

SEQ ID NO: 11770 - DNA, 20 bp, synthetic construct
  source 1..20: mol_type = other DNA
cagagagtttagggtaactg

SEQ ID NO: 11771 - DNA, 20 bp, synthetic construct
  source 1..20: mol_type = other DNA
cttcagcacagtctctgaag

SEQ ID NO: 11772 - DNA, 20 bp, synthetic construct
  source 1..20: mol_type = other DNA
caaactcatttcccagccaa

SEQ ID NO: 11773 - DNA, 20 bp, synthetic construct
  source 1..20: mol_type = other DNA
cgtgcttcagcaaggtctcc

SEQ ID NO: 11774 - DNA, 20 bp, synthetic construct
  source 1..20: mol_type = other DNA
gactgaggcatttagacacc

SEQ ID NO: 11775 - DNA, 20 bp, synthetic construct
  source 1..20: mol_type = other DNA
gctgatgaagacaaagaggg

SEQ ID NO: 11776 - DNA, 20 bp, synthetic construct
  source 1..20: mol_type = other DNA
cctgcgtaattgtgtctctt

SEQ ID NO: 11777 - DNA, 20 bp, synthetic construct
  source 1..20: mol_type = other DNA
agaaaatgctttcttgaggc

SEQ ID NO: 11778 - DNA, 20 bp, synthetic construct
  source 1..20: mol_type = other DNA
atggtaaagcctggtctcgt

SEQ ID NO: 11779 - DNA, 20 bp, synthetic construct
  source 1..20: mol_type = other DNA
ttaagcacctgtttcttgca

SEQ ID NO: 11780 - DNA, 20 bp, synthetic construct
  source 1..20: mol_type = other DNA
ctagaccctagacatgtaga

SEQ ID NO: 11781 - DNA, 20 bp, synthetic construct
  source 1..20: mol_type = other DNA
tcttctcatctgacagctgg

SEQ ID NO: 11782 - DNA, 20 bp, synthetic construct
  source 1..20: mol_type = other DNA
accagacagaagatgacaga

SEQ ID NO: 11783 - DNA, 20 bp, synthetic construct
  source 1..20: mol_type = other DNA
gtcctccaattcccgcatct

SEQ ID NO: 11784 - DNA, 20 bp, synthetic construct
  source 1..20: mol_type = other DNA
gatgtggtctctgagttccc

SEQ ID NO: 11785 - DNA, 20 bp, synthetic construct
  source 1..20: mol_type = other DNA
taccacagcttgttcttcat

SEQ ID NO: 11786 - DNA, 20 bp, synthetic construct
  source 1..20: mol_type = other DNA
tgggtatccataatcgccat

SEQ ID NO: 11787 - DNA, 20 bp, synthetic construct
  source 1..20: mol_type = other DNA
tgtgcggtagcaagtttctc

SEQ ID NO: 11788 - DNA, 20 bp, synthetic construct
  source 1..20: mol_type = other DNA
acaggtaacccgggaactac

SEQ ID NO: 11789 - DNA, 20 bp, synthetic construct
  source 1..20: mol_type = other DNA
ggcgtagtcgctgaaacttg

SEQ ID NO: 11790 - DNA, 20 bp, synthetic construct
  source 1..20: mol_type = other DNA
ggctgtactcgcagctctgg

SEQ ID NO: 11791 - DNA, 20 bp, synthetic construct
  source 1..20: mol_type = other DNA
ttgtgttccggcaagttcca

SEQ ID NO: 11792 - DNA, 20 bp, synthetic construct
  source 1..20: mol_type = other DNA
tggtgcacattttctgggtt

SEQ ID NO: 11793 - DNA, 20 bp, synthetic construct
  source 1..20: mol_type = other DNA
cgcaggtactgcatgcagtt

SEQ ID NO: 11794 - DNA, 20 bp, synthetic construct
  source 1..20: mol_type = other DNA
tgggcgtttagagttataca

SEQ ID NO: 11795 - DNA, 20 bp, synthetic construct
  source 1..20: mol_type = other DNA
aagatgcctacgcatccatt

SEQ ID NO: 11796 - DNA, 20 bp, synthetic construct
  source 1..20: mol_type = other DNA
tgcacccatcctgtcaaggt

SEQ ID NO: 11797 - DNA, 20 bp, synthetic construct
  source 1..20: mol_type = other DNA
tgtacagctctccgaaggcg

SEQ ID NO: 11798 - DNA, 20 bp, synthetic construct
  source 1..20: mol_type = other DNA
aaataggtggtgtccacagc

SEQ ID NO: 11799 - DNA, 20 bp, synthetic construct
  source 1..20: mol_type = other DNA
aacacagcggcagccaccgc

SEQ ID NO: 11800 - DNA, 20 bp, synthetic construct
  source 1..20: mol_type = other DNA
cttactgttctgcagatact

SEQ ID NO: 11801 - DNA, 20 bp, synthetic construct
  source 1..20: mol_type = other DNA
gggcagatcaagagaaacac

SEQ ID NO: 11802 - DNA, 20 bp, synthetic construct
  source 1..20: mol_type = other DNA
gtccacatgctggccaccta

SEQ ID NO: 11803 - DNA, 20 bp, synthetic construct
  source 1..20: mol_type = other DNA
atactgcctagttcactagc

SEQ ID NO: 11804 - DNA, 20 bp, synthetic construct
  source 1..20: mol_type = other DNA
gattgaaatgacaggtagcc

SEQ ID NO: 11805 - DNA, 20 bp, synthetic construct
  source 1..20: mol_type = other DNA
ctcgtgggagcacttcacta

SEQ ID NO: 11806 - DNA, 20 bp, synthetic construct
  source 1..20: mol_type = other DNA
aagacccgtggctgttgagg

SEQ ID NO: 11807 - DNA, 20 bp, synthetic construct
  source 1..20: mol_type = other DNA
ggtttctgagatgcgattgc

SEQ ID NO: 11808 - DNA, 20 bp, synthetic construct
  source 1..20: mol_type = other DNA
ccagtaaaaggttttgcaca

SEQ ID NO: 11809 - DNA, 20 bp, synthetic construct
  source 1..20: mol_type = other DNA
taatttctggaatgcacgag

SEQ ID NO: 11810 - DNA, 20 bp, synthetic construct
  source 1..20: mol_type = other DNA
ccggccaaacttagtcccag

SEQ ID NO: 11811 - DNA, 20 bp, synthetic construct
  source 1..20: mol_type = other DNA
ccattcgccacccaacccgc

SEQ ID NO: 11812 - DNA, 20 bp, synthetic construct
  source 1..20: mol_type = other DNA
gtctctcggttggctaagtc

SEQ ID NO: 11813 - DNA, 20 bp, synthetic construct
  source 1..20: mol_type = other DNA
gttgatggtcctgatcgaga

SEQ ID NO: 11814 - DNA, 20 bp, synthetic construct
  source 1..20: mol_type = other DNA
cctccggcaaagactcatgt

SEQ ID NO: 11815 - DNA, 20 bp, synthetic construct
  source 1..20: mol_type = other DNA
catcctgagctagctgaaca

SEQ ID NO: 11816 - DNA, 20 bp, synthetic construct
  source 1..20: mol_type = other DNA
tccaatatcactgtgggaga

SEQ ID NO: 11817 - DNA, 20 bp, synthetic construct
  source 1..20: mol_type = other DNA
tccagccacaaggtcctttc

SEQ ID NO: 11818 - DNA, 20 bp, synthetic construct
  source 1..20: mol_type = other DNA
ggtagacaccacgctcaggg

SEQ ID NO: 11819 - DNA, 20 bp, synthetic construct
  source 1..20: mol_type = other DNA
ctccagaaactgctagtgac

SEQ ID NO: 11820 - DNA, 20 bp, synthetic construct
  source 1..20: mol_type = other DNA
ctgtgacgctctcaacttca

SEQ ID NO: 11821 - DNA, 20 bp, synthetic construct
  source 1..20: mol_type = other DNA
gccttctcctcgtactgctg

SEQ ID NO: 11822 - DNA, 20 bp, synthetic construct
  source 1..20: mol_type = other DNA
cgcaccaatacggcttcttt

SEQ ID NO: 11823 - DNA, 20 bp, synthetic construct
  source 1..20: mol_type = other DNA
aggccacttatacgtgattt

SEQ ID NO: 11824 - DNA, 20 bp, synthetic construct
  source 1..20: mol_type = other DNA
aaaaaggccgctgttgtttt

SEQ ID NO: 11825 - DNA, 20 bp, synthetic construct
  source 1..20: mol_type = other DNA
catcattagggaggaagccc

SEQ ID NO: 11826 - DNA, 20 bp, synthetic construct
  source 1..20: mol_type = other DNA
gtttccgctcatcggtctcc

SEQ ID NO: 11827 - DNA, 20 bp, synthetic construct
  source 1..20: mol_type = other DNA
actaaagaggcggtcaataa

SEQ ID NO: 11828 - DNA, 20 bp, synthetic construct
  source 1..20: mol_type = other DNA
ggaaggataaaacgcggtcc

SEQ ID NO: 11829 - DNA, 20 bp, synthetic construct
  source 1..20: mol_type = other DNA
acatagcgactcgttaactg

SEQ ID NO: 11830 - DNA, 20 bp, synthetic construct
  source 1..20: mol_type = other DNA
gattttggacaagagcatcc

SEQ ID NO: 11831 - DNA, 20 bp, synthetic construct
  source 1..20: mol_type = other DNA
tcctgcttggcgagacgtgt

SEQ ID NO: 11832 - DNA, 20 bp, synthetic construct
  source 1..20: mol_type = other DNA
ccttcagggcatctgatagg

SEQ ID NO: 11833 - DNA, 20 bp, synthetic construct
  source 1..20: mol_type = other DNA
gggagtgcatacacacgtgc

SEQ ID NO: 11834 - DNA, 20 bp, synthetic construct
  source 1..20: mol_type = other DNA
tgatccatgctgagagtatc

SEQ ID NO: 11835 - DNA, 20 bp, synthetic construct
  source 1..20: mol_type = other DNA
gtgaactttacatccctctt

SEQ ID NO: 11836 - DNA, 20 bp, synthetic construct
  source 1..20: mol_type = other DNA
gcacccgacagacacgggct

SEQ ID NO: 11837 - DNA, 20 bp, synthetic construct
  source 1..20: mol_type = other DNA
tcaccaactgagtctggctt

SEQ ID NO: 11838 - DNA, 20 bp, synthetic construct
  source 1..20: mol_type = other DNA
ctgtgactctctgctgtaag

SEQ ID NO: 11839 - DNA, 20 bp, synthetic construct
  source 1..20: mol_type = other DNA
ttcttgtctcatttgttggg

SEQ ID NO: 11840 - DNA, 20 bp, synthetic construct
  source 1..20: mol_type = other DNA
caactgccgcaggcgggatc

SEQ ID NO: 11841 - DNA, 20 bp, synthetic construct
  source 1..20: mol_type = other DNA
ggcaaattagtagccacaat

SEQ ID NO: 11842 - DNA, 20 bp, synthetic construct
  source 1..20: mol_type = other DNA
acatgagcgacaaactcaag

SEQ ID NO: 11843 - DNA, 20 bp, synthetic construct
  source 1..20: mol_type = other DNA
tgcccacatctttttctctc

SEQ ID NO: 11844 - DNA, 20 bp, synthetic construct
  source 1..20: mol_type = other DNA
cattcaacctgggctggtcc

SEQ ID NO: 11845 - DNA, 20 bp, synthetic construct
  source 1..20: mol_type = other DNA
gcccaagtgtgatggttcta

SEQ ID NO: 11846 - DNA, 20 bp, synthetic construct
  source 1..20: mol_type = other DNA
tggaaaggcagaaggcttga

SEQ ID NO: 11847 - DNA, 20 bp, synthetic construct
  source 1..20: mol_type = other DNA
cactccttgtgctaggaggg

SEQ ID NO: 11848 - DNA, 20 bp, synthetic construct
  source 1..20: mol_type = other DNA
aacagtcaacctccttctcc

SEQ ID NO: 11849 - DNA, 20 bp, synthetic construct
  source 1..20: mol_type = other DNA
actgatgacactgcctggca

SEQ ID NO: 11850 - DNA, 20 bp, synthetic construct
  source 1..20: mol_type = other DNA
tgctgtagcactcttcctgc

SEQ ID NO: 11851 - DNA, 20 bp, synthetic construct
  source 1..20: mol_type = other DNA
tggttggacagccaggctca

SEQ ID NO: 11852 - DNA, 20 bp, synthetic construct
  source 1..20: mol_type = other DNA
acgttcacactgttttgtct

SEQ ID NO: 11853 - DNA, 20 bp, synthetic construct
  source 1..20: mol_type = other DNA
gactgatttgatgtagccgg

SEQ ID NO: 11854 - DNA, 20 bp, synthetic construct
  source 1..20: mol_type = other DNA
tccgattgtatgtgagccaa

SEQ ID NO: 11855 - DNA, 20 bp, synthetic construct
  source 1..20: mol_type = other DNA
agctaaggatgctcccagat

SEQ ID NO: 11856 - DNA, 20 bp, synthetic construct
  source 1..20: mol_type = other DNA
ccgttcagctgcatcccatg

SEQ ID NO: 11857 - DNA, 20 bp, synthetic construct
  source 1..20: mol_type = other DNA
taatcgcactggtcaaagcc

SEQ ID NO: 11858 - DNA, 20 bp, synthetic construct
  source 1..20: mol_type = other DNA
ttggtagttagcagcttcaa

SEQ ID NO: 11859 - DNA, 20 bp, synthetic construct
  source 1..20: mol_type = other DNA
agaatcacctccaggtcctg

SEQ ID NO: 11860 - DNA, 20 bp, synthetic construct
  source 1..20: mol_type = other DNA
gagggaccttacgagctccc

SEQ ID NO: 11861 - DNA, 20 bp, synthetic construct
  source 1..20: mol_type = other DNA
tgcctttcacttggttgaag

SEQ ID NO: 11862 - DNA, 20 bp, synthetic construct
  source 1..20: mol_type = other DNA
ttaacagcccaaaaaggcag

SEQ ID NO: 11863 - DNA, 20 bp, synthetic construct
  source 1..20: mol_type = other DNA
gatgatccagcatggttttc

SEQ ID NO: 11864 - DNA, 20 bp, synthetic construct
  source 1..20: mol_type = other DNA
cttcattggtgaaggatgtc

SEQ ID NO: 11865 - DNA, 20 bp, synthetic construct
  source 1..20: mol_type = other DNA
gttgtggagcaatacggtac

SEQ ID NO: 11866 - DNA, 20 bp, synthetic construct
  source 1..20: mol_type = other DNA
acatgtcagtcttgatgacc

SEQ ID NO: 11867 - DNA, 20 bp, synthetic construct
  source 1..20: mol_type = other DNA
gagtgagtgttcaagtcttc

SEQ ID NO: 11868 - DNA, 20 bp, synthetic construct
  source 1..20: mol_type = other DNA
agcaatgaggatgacagcga

SEQ ID NO: 11869 - DNA, 20 bp, synthetic construct
  source 1..20: mol_type = other DNA
tgacaaagcagcgcctcaga

SEQ ID NO: 11870 - DNA, 20 bp, synthetic construct
  source 1..20: mol_type = other DNA
agacccactcatttgcagca

SEQ ID NO: 11871 - DNA, 20 bp, synthetic construct
  source 1..20: mol_type = other DNA
tgcaggtgtaatgaagacct

SEQ ID NO: 11872 - DNA, 20 bp, synthetic construct
  source 1..20: mol_type = other DNA
aaggaaagacatttcccttc

SEQ ID NO: 11873 - DNA, 20 bp, synthetic construct
  source 1..20: mol_type = other DNA
cttgcgagatgagcgaatgg

SEQ ID NO: 11874 - DNA, 20 bp, synthetic construct
  source 1..20: mol_type = other DNA
ccttagctcctgagtttaag

SEQ ID NO: 11875 - DNA, 20 bp, synthetic construct
  source 1..20: mol_type = other DNA
cgtcagttccttgaggcggg

SEQ ID NO: 11876 - DNA, 20 bp, synthetic construct
  source 1..20: mol_type = other DNA
cgaaaagtcctcaacgtcct

SEQ ID NO: 11877 - DNA, 20 bp, synthetic construct
  source 1..20: mol_type = other DNA
actccatctaccagtctcag

SEQ ID NO: 11878 - DNA, 20 bp, synthetic construct
  source 1..20: mol_type = other DNA
acagtaatggtgaagggact

SEQ ID NO: 11879 - DNA, 20 bp, synthetic construct
  source 1..20: mol_type = other DNA
ggactcccgagaccaggtca

SEQ ID NO: 11880 - DNA, 20 bp, synthetic construct
  source 1..20: mol_type = other DNA
ctgaaagaagccttctgggc

SEQ ID NO: 11881 - DNA, 20 bp, synthetic construct
  source 1..20: mol_type = other DNA
cggttgccttgatcccactc

SEQ ID NO: 11882 - DNA, 20 bp, synthetic construct
  source 1..20: mol_type = other DNA
ttgacgggtttttcctgtcc

SEQ ID NO: 11883 - DNA, 20 bp, synthetic construct
  source 1..20: mol_type = other DNA
ggaatacttcagtggctgag

SEQ ID NO: 11884 - DNA, 20 bp, synthetic construct
  source 1..20: mol_type = other DNA
gtccagatgacttcggcctt

SEQ ID NO: 11885 - DNA, 20 bp, synthetic construct
  source 1..20: mol_type = other DNA
agaccacattggcctatttc

SEQ ID NO: 11886 - DNA, 20 bp, synthetic construct
  source 1..20: mol_type = other DNA
tgctcacgaagcaggtgaag

SEQ ID NO: 11887 - DNA, 20 bp, synthetic construct
  source 1..20: mol_type = other DNA
atgtgggtctttcgcagcag

SEQ ID NO: 11888 - DNA, 20 bp, synthetic construct
  source 1..20: mol_type = other DNA
tcattgcccaatttcccatc

SEQ ID NO: 11889 - DNA, 20 bp, synthetic construct
  source 1..20: mol_type = other DNA
ggtggctcagttagttaacc

SEQ ID NO: 11890 - DNA, 20 bp, synthetic construct
  source 1..20: mol_type = other DNA
ctgctgtgcacttgaatttt

SEQ ID NO: 11891 - DNA, 20 bp, synthetic construct
  source 1..20: mol_type = other DNA
atcatcggtcttcagatgct

SEQ ID NO: 11892 - DNA, 20 bp, synthetic construct
  source 1..20: mol_type = other DNA
accagttgttgggttctgtg

SEQ ID NO: 11893 - DNA, 20 bp, synthetic construct
  source 1..20: mol_type = other DNA
aggtgtccttggaaggattc

SEQ ID NO: 11894 - DNA, 20 bp, synthetic construct
  source 1..20: mol_type = other DNA
tgttgtagtttcttggtagg

SEQ ID NO: 11895 - DNA, 20 bp, synthetic construct
  source 1..20: mol_type = other DNA
ttgttcctgggagcttctcc

SEQ ID NO: 11896 - DNA, 20 bp, synthetic construct
  source 1..20: mol_type = other DNA
gaatactgaaacagggttgt

SEQ ID NO: 11897 - DNA, 20 bp, synthetic construct
  source 1..20: mol_type = other DNA
ttcccaccgttccctctacc

SEQ ID NO: 11898 - DNA, 20 bp, synthetic construct
  source 1..20: mol_type = other DNA
aagagactctgaatttgggc

SEQ ID NO: 11899 - DNA, 20 bp, synthetic construct
  source 1..20: mol_type = other DNA
aattccttcagtgacaggtg

SEQ ID NO: 11900 - DNA, 20 bp, synthetic construct
  source 1..20: mol_type = other DNA
cggagaagttacatccaaag

SEQ ID NO: 11901 - DNA, 20 bp, synthetic construct
  source 1..20: mol_type = other DNA
ttgttgctcatggtgtagta

SEQ ID NO: 11902 - DNA, 20 bp, synthetic construct
  source 1..20: mol_type = other DNA
tcgaaagcagatgacacatt

SEQ ID NO: 11903 - DNA, 20 bp, synthetic construct
  source 1..20: mol_type = other DNA
agcgggtgccatcacggtta

SEQ ID NO: 11904 - DNA, 20 bp, synthetic construct
  source 1..20: mol_type = other DNA
ctgtgttgtttgctgcacag

SEQ ID NO: 11905 - DNA, 20 bp, synthetic construct
  source 1..20: mol_type = other DNA
tggtgcttaaacacaagtgt

SEQ ID NO: 11906 - DNA, 20 bp, synthetic construct
  source 1..20: mol_type = other DNA
cccggttcattgtggccttg

SEQ ID NO: 11907 - DNA, 20 bp, synthetic construct
  source 1..20: mol_type = other DNA
cctgggtaacccgttttaca

SEQ ID NO: 11908 - DNA, 20 bp, synthetic construct
  source 1..20: mol_type = other DNA
aactttggacagatgactca

SEQ ID NO: 11909 - DNA, 20 bp, synthetic construct
  source 1..20: mol_type = other DNA
gtcctcccagaattcatggc

SEQ ID NO: 11910 - DNA, 20 bp, synthetic construct
  source 1..20: mol_type = other DNA
ccaatggtgcatccagctct

SEQ ID NO: 11911 - DNA, 20 bp, synthetic construct
  source 1..20: mol_type = other DNA
ggccacgtgtagttgccatg

SEQ ID NO: 11912 - DNA, 20 bp, synthetic construct
  source 1..20: mol_type = other DNA
gatgatcagcgtaccattgg

SEQ ID NO: 11913 - DNA, 20 bp, synthetic construct
  source 1..20: mol_type = other DNA
gctcttcaacagaaacattg

SEQ ID NO: 11914 - DNA, 20 bp, synthetic construct
  source 1..20: mol_type = other DNA
cttctttcacttccttggtc

SEQ ID NO: 11915 - DNA, 20 bp, synthetic construct
  source 1..20: mol_type = other DNA
cggcccatatacttggaatg

SEQ ID NO: 11916 - DNA, 20 bp, synthetic construct
  source 1..20: mol_type = other DNA
ttcatctggtggatgcgaat

SEQ ID NO: 11917 - DNA, 20 bp, synthetic construct
  source 1..20: mol_type = other DNA
aaccagtgacaggagaagga

SEQ ID NO: 11918 - DNA, 20 bp, synthetic construct
  source 1..20: mol_type = other DNA
gttaagctcaccacttcatt

SEQ ID NO: 11919 - DNA, 20 bp, synthetic construct
  source 1..20: mol_type = other DNA
gggatacaggtctctctccc

SEQ ID NO: 11920 - DNA, 20 bp, synthetic construct
  source 1..20: mol_type = other DNA
ggtggactaaaggatctcat

SEQ ID NO: 11921 - DNA, 20 bp, synthetic construct
  source 1..20: mol_type = other DNA
gctgttaataatcccatgca

SEQ ID NO: 11922 - DNA, 20 bp, synthetic construct
  source 1..20: mol_type = other DNA
agcgtggaaccttcctttaa

SEQ ID NO: 11923 - DNA, 20 bp, synthetic construct
  source 1..20: mol_type = other DNA
ggtcaccgttgctcctggct

SEQ ID NO: 11924 - DNA, 20 bp, synthetic construct
  source 1..20: mol_type = other DNA
tgcttccagcaccgggtctg

SEQ ID NO: 11925 - DNA, 20 bp, synthetic construct
  source 1..20: mol_type = other DNA
acctcagtggctttgcctgg

SEQ ID NO: 11926 - DNA, 20 bp, synthetic construct
  source 1..20: mol_type = other DNA
tgtgggtctcctggagtaag

SEQ ID NO: 11927 - DNA, 20 bp, synthetic construct
  source 1..20: mol_type = other DNA
tgccataaggaagttcagtg

SEQ ID NO: 11928 - DNA, 20 bp, synthetic construct
  source 1..20: mol_type = other DNA
cacaccgtggtgctgtcctg

SEQ ID NO: 11929 - DNA, 20 bp, synthetic construct
  source 1..20: mol_type = other DNA
aggtgccgccatttcgagtt

SEQ ID NO: 11930 - DNA, 20 bp, synthetic construct
  source 1..20: mol_type = other DNA
actctgggtgaacatacatt

SEQ ID NO: 11931 - DNA, 20 bp, synthetic construct
  source 1..20: mol_type = other DNA
cccagaagccctctcctttt

SEQ ID NO: 11932 - DNA, 20 bp, synthetic construct
  source 1..20: mol_type = other DNA
tggcactggtaactgccctc

SEQ ID NO: 11933 - DNA, 20 bp, synthetic construct
  source 1..20: mol_type = other DNA
acctagacaggtccttcagc

SEQ ID NO: 11934 - DNA, 20 bp, synthetic construct
  source 1..20: mol_type = other DNA
ggagttggcgaagctggtgc

SEQ ID NO: 11935 - DNA, 20 bp, synthetic construct
  source 1..20: mol_type = other DNA
ggccttccaagttctgagtc

SEQ ID NO: 11936 - DNA, 20 bp, synthetic construct
  source 1..20: mol_type = other DNA
aattttcaaccagtatggcc

SEQ ID NO: 11937 - DNA, 20 bp, synthetic construct
  source 1..20: mol_type = other DNA
ttgcagacacttggtgttcg

SEQ ID NO: 11938 - DNA, 20 bp, synthetic construct
  source 1..20: mol_type = other DNA
aaccacatactccactgtgg

SEQ ID NO: 11939 - DNA, 20 bp, synthetic construct
  source 1..20: mol_type = other DNA
ctgaacattgggtggtgtcc

SEQ ID NO: 11940 - DNA, 20 bp, synthetic construct
  source 1..20: mol_type = other DNA
caccatttgccagcagtggg

SEQ ID NO: 11941 - DNA, 20 bp, synthetic construct
  source 1..20: mol_type = other DNA
ctctttctcgtcctgccggg

SEQ ID NO: 11942 - DNA, 20 bp, synthetic construct
  source 1..20: mol_type = other DNA
actatcgtcagacaggtcct

SEQ ID NO: 11943 - DNA, 20 bp, synthetic construct
  source 1..20: mol_type = other DNA
aaggactacacagctcaccc

SEQ ID NO: 11944 - DNA, 20 bp, synthetic construct
  source 1..20: mol_type = other DNA
aaggctagtaagtttcccac

SEQ ID NO: 11945 - DNA, 20 bp, synthetic construct
  source 1..20: mol_type = other DNA
tttgcagcagatctgagaat

SEQ ID NO: 11946 - DNA, 20 bp, synthetic construct
  source 1..20: mol_type = other DNA
aaagggcttccagaatctcc

SEQ ID NO: 11947 - DNA, 20 bp, synthetic construct
  source 1..20: mol_type = other DNA
tggctgggtcatagcatgga

SEQ ID NO: 11948 - DNA, 20 bp, synthetic construct
  source 1..20: mol_type = other DNA
ttattcagttgctggcacct

SEQ ID NO: 11949 - DNA, 20 bp, synthetic construct
  source 1..20: mol_type = other DNA
ctacgtccttacacacgagg

SEQ ID NO: 11950 - DNA, 20 bp, synthetic construct
  source 1..20: mol_type = other DNA
cctgtgatgaaggaagaaga

SEQ ID NO: 11951 - DNA, 20 bp, synthetic construct
  source 1..20: mol_type = other DNA
gcgagtgtgggtgcaatggg

SEQ ID NO: 11952 - DNA, 20 bp, synthetic construct
  source 1..20: mol_type = other DNA
agaagggctatgcactggca

SEQ ID NO: 11953 - DNA, 20 bp, synthetic construct
  source 1..20: mol_type = other DNA
attcacatccctttcatcag

SEQ ID NO: 11954 - DNA, 20 bp, synthetic construct
  source 1..20: mol_type = other DNA
attgccagctttgtaaagcc

SEQ ID NO: 11955 - DNA, 20 bp, synthetic construct
  source 1..20: mol_type = other DNA
gcgctctgttgggagtcagt

SEQ ID NO: 11956 - DNA, 20 bp, synthetic construct
  source 1..20: mol_type = other DNA
gttttgttctcacagctgtg

SEQ ID NO: 11957 - DNA, 20 bp, synthetic construct
  source 1..20: mol_type = other DNA
ggcgcttccattggtgggcg

SEQ ID NO: 11958 - DNA, 20 bp, synthetic construct
  source 1..20: mol_type = other DNA
aactagacgtgcaaggcgct

SEQ ID NO: 11959 - DNA, 20 bp, synthetic construct
  source 1..20: mol_type = other DNA
agaacaaaacgtccatgttc

SEQ ID NO: 11960 - DNA, 20 bp, synthetic construct
  source 1..20: mol_type = other DNA
ttatccgctacatctgaatg

SEQ ID NO: 11961 - DNA, 20 bp, synthetic construct
  source 1..20: mol_type = other DNA
gtattgctttgcgttggaca

SEQ ID NO: 11962 - DNA, 20 bp, synthetic construct
  source 1..20: mol_type = other DNA
cgcgttccacaaggacctgg

SEQ ID NO: 11963 - DNA, 20 bp, synthetic construct
  source 1..20: mol_type = other DNA
cattctggcgggtccaggag

SEQ ID NO: 11964 - DNA, 20 bp, synthetic construct
  source 1..20: mol_type = other DNA
tgggtttaccggtggacttg

SEQ ID NO: 11965 - DNA, 20 bp, synthetic construct
  source 1..20: mol_type = other DNA
caaaccacacagacggaggg

SEQ ID NO: 11966 - DNA, 20 bp, synthetic construct
  source 1..20: mol_type = other DNA
agggttctgtctgagttctg

SEQ ID NO: 11967 - DNA, 20 bp, synthetic construct
  source 1..20: mol_type = other DNA
aagcgtggtcaggcttggaa

SEQ ID NO: 11968 - DNA, 20 bp, synthetic construct
  source 1..20: mol_type = other DNA
gatggatgagtttgtgcctg

SEQ ID NO: 11969 - DNA, 20 bp, synthetic construct
  source 1..20: mol_type = other DNA
ctctaatgagtttagtccga

SEQ ID NO: 11970 - DNA, 20 bp, synthetic construct
  source 1..20: mol_type = other DNA
aactgacgcggcctgcctga

SEQ ID NO: 11971 - DNA, 20 bp, synthetic construct
  source 1..20: mol_type = other DNA
gcgggctttaagtgagtagg

SEQ ID NO: 11972 - DNA, 20 bp, synthetic construct
  source 1..20: mol_type = other DNA
cgctttttattctgcggaaa

SEQ ID NO: 11973 - DNA, 20 bp, synthetic construct
  source 1..20: mol_type = other DNA
gtatccctggacgcactgat

SEQ ID NO: 11974 - DNA, 20 bp, synthetic construct
  source 1..20: mol_type = other DNA
gcatctgtgggtctccacgt

SEQ ID NO: 11975 - DNA, 20 bp, synthetic construct
  source 1..20: mol_type = other DNA
cacctgaaactcatactggg

SEQ ID NO: 11976 - DNA, 20 bp, synthetic construct
  source 1..20: mol_type = other DNA
agaccagtgatgattttcac

SEQ ID NO: 11977 - DNA, 20 bp, synthetic construct
  source 1..20: mol_type = other DNA
ggatgtaccgaatttgtttg

SEQ ID NO: 11978 - DNA, 20 bp, synthetic construct
  source 1..20: mol_type = other DNA
ctcaggtcaaaaggagcctc

SEQ ID NO: 11979 - DNA, 20 bp, synthetic construct
  source 1..20: mol_type = other DNA
agataaggtccattcatcca

SEQ ID NO: 11980 - DNA, 20 bp, synthetic construct
  source 1..20: mol_type = other DNA
tcactggtgctgtccggcac

SEQ ID NO: 11981 - DNA, 20 bp, synthetic construct
  source 1..20: mol_type = other DNA
cgactaaggagtggcgagct

SEQ ID NO: 11982 - DNA, 20 bp, synthetic construct
  source 1..20: mol_type = other DNA
agtgagagggcaagcgctcc

SEQ ID NO: 11983 - DNA, 20 bp, synthetic construct
  source 1..20: mol_type = other DNA
ttctctgaggccgtgaagtt

SEQ ID NO: 11984 - DNA, 20 bp, synthetic construct
  source 1..20: mol_type = other DNA
cgctgtccacacggaaggct

SEQ ID NO: 11985 - DNA, 20 bp, synthetic construct
  source 1..20: mol_type = other DNA
gtccatgatgtcgtcagccg

SEQ ID NO: 11986 - DNA, 20 bp, synthetic construct
  source 1..20: mol_type = other DNA
atgttgttttcagccagctt

SEQ ID NO: 11987 - DNA, 20 bp, synthetic construct
  source 1..20: mol_type = other DNA
tcctggaagtaatccgggca

SEQ ID NO: 11988 - DNA, 20 bp, synthetic construct
  source 1..20: mol_type = other DNA
tggacactaggaatgtgtaa

SEQ ID NO: 11989 - DNA, 20 bp, synthetic construct
  source 1..20: mol_type = other DNA
accaatcagcaaaggagtga

SEQ ID NO: 11990 - DNA, 20 bp, synthetic construct
  source 1..20: mol_type = other DNA
tttgtcacgtatcaggttct

SEQ ID NO: 11991 - DNA, 20 bp, synthetic construct
  source 1..20: mol_type = other DNA
cactttatttctcacaggtg

SEQ ID NO: 11992 - DNA, 20 bp, synthetic construct
  source 1..20: mol_type = other DNA
aattgttgaagctgagctgg

SEQ ID NO: 11993 - DNA, 20 bp, synthetic construct
  source 1..20: mol_type = other DNA
ccattctgattggcatagta

SEQ ID NO: 11994 - DNA, 20 bp, synthetic construct
  source 1..20: mol_type = other DNA
cccagtcggaggctctgaga

SEQ ID NO: 11995 - DNA, 20 bp, synthetic construct
  source 1..20: mol_type = other DNA
caaagtggccgtcgtggctg

SEQ ID NO: 11996 - DNA, 20 bp, synthetic construct
  source 1..20: mol_type = other DNA
cctgttagaaagcatttctg

SEQ ID NO: 11997 - DNA, 20 bp, synthetic construct
  source 1..20: mol_type = other DNA
gaatgacagaggcaaaaacc

SEQ ID NO: 11998 - DNA, 20 bp, synthetic construct
  source 1..20: mol_type = other DNA
gacagaaaactggattctgc

SEQ ID NO: 11999 - DNA, 20 bp, synthetic construct
  source 1..20: mol_type = other DNA
agattgcatagcaatagggc

SEQ ID NO: 12000 - DNA, 20 bp, synthetic construct
  source 1..20: mol_type = other DNA
ggagaaggtcataggaattt

SEQ ID NO: 12001 - DNA, 20 bp, synthetic construct
  source 1..20: mol_type = other DNA
cccgtgccaggattctgccc

SEQ ID NO: 12002 - DNA, 20 bp, synthetic construct
  source 1..20: mol_type = other DNA
gttgtttcgggcttcaggcc

SEQ ID NO: 12003 - DNA, 20 bp, synthetic construct
  source 1..20: mol_type = other DNA
gttcatgtccgggatgtaga

SEQ ID NO: 12004 - DNA, 20 bp, synthetic construct
  source 1..20: mol_type = other DNA
gacaaatggaatgccagtgt

SEQ ID NO: 12005 - DNA, 20 bp, synthetic construct
  source 1..20: mol_type = other DNA
atcggtgctcaaagcaatca

SEQ ID NO: 12006 - DNA, 20 bp, synthetic construct
  source 1..20: mol_type = other DNA
tacccagaggaagctataga

SEQ ID NO: 12007 - DNA, 20 bp, synthetic construct
  source 1..20: mol_type = other DNA
tatcaaaggccttgactact

SEQ ID NO: 12008 - DNA, 20 bp, synthetic construct
  source 1..20: mol_type = other DNA
gtgttggagaagctgcaggt

SEQ ID NO: 12009 - DNA, 20 bp, synthetic construct
  source 1..20: mol_type = other DNA
gtgggagtggtcttccatta

SEQ ID NO: 12010 - DNA, 20 bp, synthetic construct
  source 1..20: mol_type = other DNA
gtagctgcacgtgttccgtg

SEQ ID NO: 12011 - DNA, 20 bp, synthetic construct
  source 1..20: mol_type = other DNA
tctgacacgcagccaggttt

SEQ ID NO: 12012 - DNA, 20 bp, synthetic construct
  source 1..20: mol_type = other DNA
tggatgtagttcttgtggca

SEQ ID NO: 12013 - DNA, 20 bp, synthetic construct
  source 1..20: mol_type = other DNA
gtcgttgcggatgctacgag

SEQ ID NO: 12014 - DNA, 20 bp, synthetic construct
  source 1..20: mol_type = other DNA
tgttgacctgggcctcgaca

SEQ ID NO: 12015 - DNA, 20 bp, synthetic construct
  source 1..20: mol_type = other DNA
ctgtcttgaaaaactgatgc

SEQ ID NO: 12016 - DNA, 20 bp, synthetic construct
  source 1..20: mol_type = other DNA
gcgggaagaacttgcattga

SEQ ID NO: 12017 - DNA, 20 bp, synthetic construct
  source 1..20: mol_type = other DNA
gtggaaggtgttgatgatgg

SEQ ID NO: 12018 - DNA, 20 bp, synthetic construct
  source 1..20: mol_type = other DNA
agggtgagtacagtccatgg

SEQ ID NO: 12019 - DNA, 20 bp, synthetic construct
  source 1..20: mol_type = other DNA
agtttgttccttcagagcag

SEQ ID NO: 12020 - DNA, 20 bp, synthetic construct
  source 1..20: mol_type = other DNA
agccaatggtggcatacaca

SEQ ID NO: 12021 - DNA, 20 bp, synthetic construct
  source 1..20: mol_type = other DNA
attgatcatccagctgtgac

SEQ ID NO: 12022 - DNA, 20 bp, synthetic construct
  source 1..20: mol_type = other DNA
atgaaacatcattggcagcg

SEQ ID NO: 12023 - DNA, 20 bp, synthetic construct
  source 1..20: mol_type = other DNA
gtaccaaatgatggatgccc

SEQ ID NO: 12024 - DNA, 20 bp, synthetic construct
  source 1..20: mol_type = other DNA
aaacacgacctaactgttca

SEQ ID NO: 12025 - DNA, 20 bp, synthetic construct
  source 1..20: mol_type = other DNA
actgtaggcatggccgacag

SEQ ID NO: 12026 - DNA, 20 bp, synthetic construct
  source 1..20: mol_type = other DNA
aacagaccactgggtgggca

SEQ ID NO: 12027 - DNA, 20 bp, synthetic construct
  source 1..20: mol_type = other DNA
tgttgagcgcgaccctcagt

SEQ ID NO: 12028 - DNA, 20 bp, synthetic construct
  source 1..20: mol_type = other DNA
tagtcggtgtcctccaacct

SEQ ID NO: 12029 - DNA, 20 bp, synthetic construct
  source 1..20: mol_type = other DNA
aagagcacccgtaactgtaa

SEQ ID NO: 12030 - DNA, 20 bp, synthetic construct
  source 1..20: mol_type = other DNA
gtagcaccatgtgagaccac

SEQ ID NO: 12031 - DNA, 20 bp, synthetic construct
  source 1..20: mol_type = other DNA
gataagcctatgccaactac

SEQ ID NO: 12032 - DNA, 20 bp, synthetic construct
  source 1..20: mol_type = other DNA
ttccctagacaaaactcctg

SEQ ID NO: 12033 - DNA, 20 bp, synthetic construct
  source 1..20: mol_type = other DNA
acctcgcgctgagttccagg

SEQ ID NO: 12034 - DNA, 20 bp, synthetic construct
  source 1..20: mol_type = other DNA
gtcaaggctttttacagctt

SEQ ID NO: 12035 - DNA, 20 bp, synthetic construct
  source 1..20: mol_type = other DNA
aagcggaaattttcttcccg

SEQ ID NO: 12036 - DNA, 20 bp, synthetic construct
  source 1..20: mol_type = other DNA
acatcgaagttgacaaggta

SEQ ID NO: 12037 - DNA, 20 bp, synthetic construct
  source 1..20: mol_type = other DNA
caatgttagccatgcccagg

SEQ ID NO: 12038 - DNA, 20 bp, synthetic construct
  source 1..20: mol_type = other DNA
ccgagctattgctggccggc

SEQ ID NO: 12039 - DNA, 20 bp, synthetic construct
  source 1..20: mol_type = other DNA
ctactatgttgtaacagctg

SEQ ID NO: 12040 - DNA, 20 bp, synthetic construct
  source 1..20: mol_type = other DNA
cttgagggttactgagattc

SEQ ID NO: 12041 - DNA, 20 bp, synthetic construct
  source 1..20: mol_type = other DNA
ttgggtagtgtttcaggcat

SEQ ID NO: 12042 - DNA, 20 bp, synthetic construct
  source 1..20: mol_type = other DNA
ggatcatttcctgttatctg

SEQ ID NO: 12043 - DNA, 20 bp, synthetic construct
  source 1..20: mol_type = other DNA
cgagttccgagcctcggagg

SEQ ID NO: 12044 - DNA, 20 bp, synthetic construct
  source 1..20: mol_type = other DNA
tttcagtgctcatggtgtcc

SEQ ID NO: 12045 - DNA, 20 bp, synthetic construct
  source 1..20: mol_type = other DNA
ccagactcggcaaagtcgag

SEQ ID NO: 12046 - DNA, 20 bp, synthetic construct
  source 1..20: mol_type = other DNA
caggattatccatgtttctg

SEQ ID NO: 12047 - DNA, 20 bp, synthetic construct
  source 1..20: mol_type = other DNA
tttgggttcgaattccatgt

SEQ ID NO: 12048 - DNA, 20 bp, synthetic construct
  source 1..20: mol_type = other DNA
gatagacatccatgaacttc

SEQ ID NO: 12049 - DNA, 20 bp, synthetic construct
  source 1..20: mol_type = other DNA
tcgttctgtatcagtctttc

SEQ ID NO: 12050 - DNA, 20 bp, synthetic construct
  source 1..20: mol_type = other DNA
gacggaatgtgggctcgagt

SEQ ID NO: 12051 - DNA, 20 bp, synthetic construct
  source 1..20: mol_type = other DNA
ggttttctcagaggtgaggc

SEQ ID NO: 12052 - DNA, 20 bp, synthetic construct
  source 1..20: mol_type = other DNA
ggatgatgcagaaagcaata

SEQ ID NO: 12053 - DNA, 20 bp, synthetic construct
  source 1..20: mol_type = other DNA
tgaaggatggcagcaaagta

SEQ ID NO: 12054 - DNA, 20 bp, synthetic construct
  source 1..20: mol_type = other DNA
ttcctgttaattccactacg

SEQ ID NO: 12055 - DNA, 20 bp, synthetic construct
  source 1..20: mol_type = other DNA
cattaagaggactcatcgtt

SEQ ID NO: 12056 - DNA, 20 bp, synthetic construct
  source 1..20: mol_type = other DNA
tggattctctgtgatcttgt

SEQ ID NO: 12057 - DNA, 20 bp, synthetic construct
  source 1..20: mol_type = other DNA
gtgtcattctgcagagcctg

SEQ ID NO: 12058 - DNA, 20 bp, synthetic construct
  source 1..20: mol_type = other DNA
acgtggcatgtcacggactt

SEQ ID NO: 12059 - DNA, 20 bp, synthetic construct
  source 1..20: mol_type = other DNA
cacttgtactccttgccatt

SEQ ID NO: 12060 - DNA, 20 bp, synthetic construct
  source 1..20: mol_type = other DNA
gttgtgcagagcctcatgca

SEQ ID NO: 12061 - DNA, 20 bp, synthetic construct
  source 1..20: mol_type = other DNA
ccaatgatatgacttcacca

SEQ ID NO: 12062 - DNA, 20 bp, synthetic construct
  source 1..20: mol_type = other DNA
gtacgtatttggagttgaac

SEQ ID NO: 12063 - DNA, 20 bp, synthetic construct
  source 1..20: mol_type = other DNA
atgttgttcctcacagaacc

SEQ ID NO: 12064 - DNA, 20 bp, synthetic construct
  source 1..20: mol_type = other DNA
tgtgagatgggcttttcatc

SEQ ID NO: 12065 - DNA, 20 bp, synthetic construct
  source 1..20: mol_type = other DNA
ggcgttggcgctaaggttga

SEQ ID NO: 12066 - DNA, 20 bp, synthetic construct
  source 1..20: mol_type = other DNA
tattcggccgtgggtccctg

SEQ ID NO: 12067 - DNA, 20 bp, synthetic construct
  source 1..20: mol_type = other DNA
cgaggacagcgggtgctctg

SEQ ID NO: 12068 - DNA, 20 bp, synthetic construct
  source 1..20: mol_type = other DNA
aggcagacaaaagggttgag

SEQ ID NO: 12069 - DNA, 20 bp, synthetic construct
  source 1..20: mol_type = other DNA
aagcaattgaggaatgtctc

SEQ ID NO: 12070 - DNA, 20 bp, synthetic construct
  source 1..20: mol_type = other DNA
cactgcatcgattttgctcc

SEQ ID NO: 12071 - DNA, 20 bp, synthetic construct
  source 1..20: mol_type = other DNA
tctagcctagaaatgcatga

SEQ ID NO: 12072 - DNA, 20 bp, synthetic construct
  source 1..20: mol_type = other DNA
acaggctcaagttccatctg

SEQ ID NO: 12073 - DNA, 20 bp, synthetic construct
  source 1..20: mol_type = other DNA
atacatgtgtacatcaccct

SEQ ID NO: 12074 - DNA, 20 bp, synthetic construct
  source 1..20: mol_type = other DNA
actaaccgacttggctgctt

SEQ ID NO: 12075 - DNA, 20 bp, synthetic construct
  source 1..20: mol_type = other DNA
ccatgtggtactgaaccaag

SEQ ID NO: 12076 - DNA, 20 bp, synthetic construct
  source 1..20: mol_type = other DNA
ggctgaagtcctgtgggcag

SEQ ID NO: 12077 - DNA, 20 bp, synthetic construct
  source 1..20: mol_type = other DNA
aggaagagctgaagttctcc

SEQ ID NO: 12078 - DNA, 20 bp, synthetic construct
  source 1..20: mol_type = other DNA
ccactcctgaaaactgaaaa

SEQ ID NO: 12079 - DNA, 20 bp, synthetic construct
  source 1..20: mol_type = other DNA
aagaacttggccacaggtcc

SEQ ID NO: 12080 - DNA, 20 bp, synthetic construct
  source 1..20: mol_type = other DNA
ttagcgggtagttcatggct

SEQ ID NO: 12081 - DNA, 20 bp, synthetic construct
  source 1..20: mol_type = other DNA
ctaaggtgatgccacggagg

SEQ ID NO: 12082 - DNA, 20 bp, synthetic construct
  source 1..20: mol_type = other DNA
ctggccaaacacccattcat

SEQ ID NO: 12083 - DNA, 20 bp, synthetic construct
  source 1..20: mol_type = other DNA
ccttggtttcagcattcttg

SEQ ID NO: 12084 - DNA, 20 bp, synthetic construct
  source 1..20: mol_type = other DNA
acgacgttcatttcctctgc

SEQ ID NO: 12085 - DNA, 20 bp, synthetic construct
  source 1..20: mol_type = other DNA
atttggcggtgaccgctgat

SEQ ID NO: 12086 - DNA, 20 bp, synthetic construct
  source 1..20: mol_type = other DNA
cctttagcattcgtacaggc

SEQ ID NO: 12087 - DNA, 20 bp, synthetic construct
  source 1..20: mol_type = other DNA
gacctccgatcactcctggc

SEQ ID NO: 12088 - DNA, 20 bp, synthetic construct
  source 1..20: mol_type = other DNA
atggcaaacatctgcaatca

SEQ ID NO: 12089 - DNA, 20 bp, synthetic construct
  source 1..20: mol_type = other DNA
gacagacttagactgatcac

SEQ ID NO: 12090 - DNA, 20 bp, synthetic construct
  source 1..20: mol_type = other DNA
actatgagcgcgcatactgg

SEQ ID NO: 12091 - DNA, 20 bp, synthetic construct
  source 1..20: mol_type = other DNA
gtcctagcgctctgtctgtt

SEQ ID NO: 12092 - DNA, 20 bp, synthetic construct
  source 1..20: mol_type = other DNA
tacgcgcaattactacatgg

SEQ ID NO: 12093 - DNA, 20 bp, synthetic construct
  source 1..20: mol_type = other DNA
ctcatcaataacagacccat

SEQ ID NO: 12094 - DNA, 20 bp, synthetic construct
  source 1..20: mol_type = other DNA
ttgtcaactgcggttgctcc

SEQ ID NO: 12095 - DNA, 20 bp, synthetic construct
  source 1..20: mol_type = other DNA
aagacaaagatggcaagaca

SEQ ID NO: 12096 - DNA, 20 bp, synthetic construct
  source 1..20: mol_type = other DNA
aggttgacaggtgggaagag

SEQ ID NO: 12097 - DNA, 20 bp, synthetic construct
  source 1..20: mol_type = other DNA
ggctaggaatgatttggaaa

SEQ ID NO: 12098 - DNA, 20 bp, synthetic construct
  source 1..20: mol_type = other DNA
cctgaaatcttgacctcagt

SEQ ID NO: 12099 - DNA, 20 bp, synthetic construct
  source 1..20: mol_type = other DNA
gctcaaacacagcattaaga

SEQ ID NO: 12100 - DNA, 20 bp, synthetic construct
  source 1..20: mol_type = other DNA
tcagattgcagtgggaagaa

SEQ ID NO: 12101 - DNA, 20 bp, synthetic construct
  source 1..20: mol_type = other DNA
attattcaccgtggcagtca

SEQ ID NO: 12102 - DNA, 20 bp, synthetic construct
  source 1..20: mol_type = other DNA
atccaagtaaccaccttggg

SEQ ID NO: 12103 - DNA, 20 bp, synthetic construct
  source 1..20: mol_type = other DNA
tggtcaggctgtaggcacct

SEQ ID NO: 12104 - DNA, 20 bp, synthetic construct
  source 1..20: mol_type = other DNA
ctacctggctgtctgtcgat

SEQ ID NO: 12105 - DNA, 20 bp, synthetic construct
  source 1..20: mol_type = other DNA
ctcattaggtcaaggctgac

SEQ ID NO: 12106 - DNA, 20 bp, synthetic construct
  source 1..20: mol_type = other DNA
cctgtgagttgtcccggatg

SEQ ID NO: 12107 - DNA, 20 bp, synthetic construct
  source 1..20: mol_type = other DNA
tcatagcgtaccttctgtgc

SEQ ID NO: 12108 - DNA, 20 bp, synthetic construct
  source 1..20: mol_type = other DNA
gcagccgttttgcaaattgt

SEQ ID NO: 12109 - DNA, 20 bp, synthetic construct
  source 1..20: mol_type = other DNA
cccatagggtcagattgctc

SEQ ID NO: 12110 - DNA, 20 bp, synthetic construct
  source 1..20: mol_type = other DNA
tgtctatgagtttcaggctg

SEQ ID NO: 12111 - DNA, 20 bp, synthetic construct
  source 1..20: mol_type = other DNA
ttcaattctgcgctccaggt

SEQ ID NO: 12112 - DNA, 20 bp, synthetic construct
  source 1..20: mol_type = other DNA
gttcgtggacagtgtattta

SEQ ID NO: 12113 - DNA, 20 bp, synthetic construct
  source 1..20: mol_type = other DNA
ttgcaggtcgctgcaaaagt

SEQ ID NO: 12114 - DNA, 20 bp, synthetic construct
  source 1..20: mol_type = other DNA
cattgtctgtcagaaccttc

SEQ ID NO: 12115 - DNA, 20 bp, synthetic construct
  source 1..20: mol_type = other DNA
ttttatacactgggttgccc

SEQ ID NO: 12116 - DNA, 20 bp, synthetic construct
  source 1..20: mol_type = other DNA
gtctccacgtaagattacct

SEQ ID NO: 12117 - DNA, 20 bp, synthetic construct
  source 1..20: mol_type = other DNA
aattggacgaggaagctcat

SEQ ID NO: 12118 - DNA, 20 bp, synthetic construct
  source 1..20: mol_type = other DNA
tgagatggtagccacggcca

SEQ ID NO: 12119 - DNA, 20 bp, synthetic construct
  source 1..20: mol_type = other DNA
gggcactcgaaggccaggca

SEQ ID NO: 12120 - DNA, 20 bp, synthetic construct
  source 1..20: mol_type = other DNA
cccatttccacttgcacatt

SEQ ID NO: 12121 - DNA, 20 bp, synthetic construct
  source 1..20: mol_type = other DNA
ggtagccgggcttacagtca

SEQ ID NO: 12122 - DNA, 20 bp, synthetic construct
  source 1..20: mol_type = other DNA
acgtactacctggccaaagc

SEQ ID NO: 12123 - DNA, 20 bp, synthetic construct
  source 1..20: mol_type = other DNA
aataaggctcagagccgtct

SEQ ID NO: 12124 - DNA, 20 bp, synthetic construct
  source 1..20: mol_type = other DNA
ggctcaaactcagttgtcac

SEQ ID NO: 12125 - DNA, 20 bp, synthetic construct
  source 1..20: mol_type = other DNA
gcttaggagctgttgtccac

SEQ ID NO: 12126 - DNA, 20 bp, synthetic construct
  source 1..20: mol_type = other DNA
agctctcgagcactccgggc

SEQ ID NO: 12127 - DNA, 20 bp, synthetic construct
  source 1..20: mol_type = other DNA
ggtgaggctatcgctttcct

SEQ ID NO: 12128 - DNA, 20 bp, synthetic construct
  source 1..20: mol_type = other DNA
ttccggagttgtttacactc

SEQ ID NO: 12129 - DNA, 20 bp, synthetic construct
  source 1..20: mol_type = other DNA
gaggatatttcgtgccgcca

SEQ ID NO: 12130 - DNA, 20 bp, synthetic construct
  source 1..20: mol_type = other DNA
tgaaaacgtgggtctctgac

SEQ ID NO: 12131 - DNA, 20 bp, synthetic construct
  source 1..20: mol_type = other DNA
gcggtgcgcctgtttccgct

SEQ ID NO: 12132 - DNA, 20 bp, synthetic construct
  source 1..20: mol_type = other DNA
gtaagtgcctgagaggacag

SEQ ID NO: 12133 - DNA, 20 bp, synthetic construct
  source 1..20: mol_type = other DNA
aagtgaggaagttgcctgtg

SEQ ID NO: 12134 - DNA, 20 bp, synthetic construct
  source 1..20: mol_type = other DNA
ggttctctcttgtacagggc

SEQ ID NO: 12135 - DNA, 20 bp, synthetic construct
  source 1..20: mol_type = other DNA
tccctagaacagaagatcac

SEQ ID NO: 12136 - DNA, 20 bp, synthetic construct
  source 1..20: mol_type = other DNA
gtcgttggcgcactcgtcta

SEQ ID NO: 12137 - DNA, 20 bp, synthetic construct
  source 1..20: mol_type = other DNA
gatgaaggtcaggtttacca

SEQ ID NO: 12138 - DNA, 20 bp, synthetic construct
  source 1..20: mol_type = other DNA
gggatgacacattgaaagaa

SEQ ID NO: 12139 - DNA, 20 bp, synthetic construct
  source 1..20: mol_type = other DNA
ctagtccggatggagagttc

SEQ ID NO: 12140 - DNA, 20 bp, synthetic construct
  source 1..20: mol_type = other DNA
cttggactcttctgggtttt

SEQ ID NO: 12141 - DNA, 20 bp, synthetic construct
  source 1..20: mol_type = other DNA
gggtccaagctattttgctt

SEQ ID NO: 12142 - DNA, 20 bp, synthetic construct
  source 1..20: mol_type = other DNA
agctctcatttccaaggaga

SEQ ID NO: 12143 - DNA, 20 bp, synthetic construct
  source 1..20: mol_type = other DNA
cataggaccgtatttcggcg

SEQ ID NO: 12144 - DNA, 20 bp, synthetic construct
  source 1..20: mol_type = other DNA
ttggcaaatctggcgtgtaa

SEQ ID NO: 12145 - DNA, 20 bp, synthetic construct
  source 1..20: mol_type = other DNA
tctggcctatatgaatccat

SEQ ID NO: 12146 - DNA, 20 bp, synthetic construct
  source 1..20: mol_type = other DNA
tggttggtgtgtatcaaact

SEQ ID NO: 12147 - DNA, 20 bp, synthetic construct
  source 1..20: mol_type = other DNA
ccagtaaaaggatgtctgca

SEQ ID NO: 12148 - DNA, 20 bp, synthetic construct
  source 1..20: mol_type = other DNA
tcaaaccatactcgctcacc

SEQ ID NO: 12149 - DNA, 20 bp, synthetic construct
  source 1..20: mol_type = other DNA
cgtacaccacaccatctttg

SEQ ID NO: 12150 - DNA, 20 bp, synthetic construct
  source 1..20: mol_type = other DNA
tcccaaccgtgaccttcttg

SEQ ID NO: 12151 - DNA, 20 bp, synthetic construct
  source 1..20: mol_type = other DNA
gcgtctgcttattcttgtct

SEQ ID NO: 12152 - DNA, 20 bp, synthetic construct
  source 1..20: mol_type = other DNA
agtcgatatggaattcgctg

SEQ ID NO: 12153 - DNA, 20 bp, synthetic construct
  source 1..20: mol_type = other DNA
cgaactacatggtatttccc

SEQ ID NO: 12154 - DNA, 20 bp, synthetic construct
  source 1..20: mol_type = other DNA
agcaagtgtacaaccctgtg

SEQ ID NO: 12155 - DNA, 20 bp, synthetic construct
  source 1..20: mol_type = other DNA
cctttcttctcgtgcagtgt

SEQ ID NO: 12156 - DNA, 20 bp, synthetic construct
  source 1..20: mol_type = other DNA
ggccatgtagttggaggact

SEQ ID NO: 12157 - DNA, 20 bp, synthetic construct
  source 1..20: mol_type = other DNA
gaacagcatctggtgctgag

SEQ ID NO: 12158 - DNA, 20 bp, synthetic construct
  source 1..20: mol_type = other DNA
tgagtagaccgagccgaagc

SEQ ID NO: 12159 - DNA, 20 bp, synthetic construct
  source 1..20: mol_type = other DNA
ccgcgattgaggtcgataag

SEQ ID NO: 12160 - DNA, 20 bp, synthetic construct
  source 1..20: mol_type = other DNA
tatgtgccacaccacccagg

SEQ ID NO: 12161 - DNA, 20 bp, synthetic construct
  source 1..20: mol_type = other DNA
caaatggaaatgtggctgtg

SEQ ID NO: 12162 - DNA, 20 bp, synthetic construct
  source 1..20: mol_type = other DNA
gtgaatcgcaccgtttctcc

SEQ ID NO: 12163 - DNA, 20 bp, synthetic construct
  source 1..20: mol_type = other DNA
taactcttgtggcacaagtt

SEQ ID NO: 12164 - DNA, 20 bp, synthetic construct
  source 1..20: mol_type = other DNA
gcgcttccagagttaaaagc

SEQ ID NO: 12165 - DNA, 20 bp, synthetic construct
  source 1..20: mol_type = other DNA
ccttgggtttcgatgcttgg

SEQ ID NO: 12166 - DNA, 20 bp, synthetic construct
  source 1..20: mol_type = other DNA
gagtacagtccactggagtc

SEQ ID NO: 12167 - DNA, 20 bp, synthetic construct
  source 1..20: mol_type = other DNA
gactccaaggattccattca

SEQ ID NO: 12168 - DNA, 20 bp, synthetic construct
  source 1..20: mol_type = other DNA
tccgataggcgtgctgtgat

SEQ ID NO: 12169 - DNA, 20 bp, synthetic construct
  source 1..20: mol_type = other DNA
gagctgcgtgtccttccaag

SEQ ID NO: 12170 - DNA, 20 bp, synthetic construct
  source 1..20: mol_type = other DNA
acatgaggccatttaggtcc

SEQ ID NO: 12171 - DNA, 20 bp, synthetic construct
  source 1..20: mol_type = other DNA
cagaggagaaatggtgctaa

SEQ ID NO: 12172 - DNA, 20 bp, synthetic construct
  source 1..20: mol_type = other DNA
ttgcacacagtgccaaacac

SEQ ID NO: 12173 - DNA, 20 bp, synthetic construct
  source 1..20: mol_type = other DNA
cacttgctctttggtcttct

SEQ ID NO: 12174 - DNA, 20 bp, synthetic construct
  source 1..20: mol_type = other DNA
gtagtctctcttcaattagg

SEQ ID NO: 12175 - DNA, 20 bp, synthetic construct
  source 1..20: mol_type = other DNA
ggtcaggattctagtgtctt

SEQ ID NO: 12176 - DNA, 20 bp, synthetic construct
  source 1..20: mol_type = other DNA
caaggtgtgcggtccagctc

SEQ ID NO: 12177 - DNA, 20 bp, synthetic construct
  source 1..20: mol_type = other DNA
tctttgacgaatgcttttcc

SEQ ID NO: 12178 - DNA, 20 bp, synthetic construct
  source 1..20: mol_type = other DNA
atcaggctaggcttatgcaa

SEQ ID NO: 12179 - DNA, 20 bp, synthetic construct
  source 1..20: mol_type = other DNA
ttgcattcttccagtgtctc

SEQ ID NO: 12180 - DNA, 20 bp, synthetic construct
  source 1..20: mol_type = other DNA
atcagctgtaccctgacttc

SEQ ID NO: 12181 - DNA, 20 bp, synthetic construct
  source 1..20: mol_type = other DNA
ttggttcgggagcggtatgt

SEQ ID NO: 12182 - DNA, 20 bp, synthetic construct
  source 1..20: mol_type = other DNA
cctatctgcagagcagtgct

SEQ ID NO: 12183 - DNA, 20 bp, synthetic construct
  source 1..20: mol_type = other DNA
tgtcattgaggcctatccac

SEQ ID NO: 12184 - DNA, 20 bp, synthetic construct
  source 1..20: mol_type = other DNA
ggttgaacacatccataaga

SEQ ID NO: 12185 - DNA, 20 bp, synthetic construct
  source 1..20: mol_type = other DNA
tgacgtacgtcacgcagggc

SEQ ID NO: 12186 - DNA, 20 bp, synthetic construct
  source 1..20: mol_type = other DNA
aacgttgacttccatgttcc

SEQ ID NO: 12187 - DNA, 20 bp, synthetic construct
  source 1..20: mol_type = other DNA
ttataaggcagttgagtgac

SEQ ID NO: 12188 - DNA, 20 bp, synthetic construct
  source 1..20: mol_type = other DNA
ctattgtgaggaatacaggg

SEQ ID NO: 12189 - DNA, 20 bp, synthetic construct
  source 1..20: mol_type = other DNA
atagtcagggtcaaagccaa

SEQ ID NO: 12190 - DNA, 20 bp, synthetic construct
  source 1..20: mol_type = other DNA
ctcatgccataggaaggacc

SEQ ID NO: 12191 - DNA, 20 bp, synthetic construct
  source 1..20: mol_type = other DNA
attggatgtttctgggttag

SEQ ID NO: 12192 - DNA, 20 bp, synthetic construct
  source 1..20: mol_type = other DNA
ccagacttgctgtccctctc

SEQ ID NO: 12193 - DNA, 20 bp, synthetic construct
  source 1..20: mol_type = other DNA
ggcacacacttggcggttct

SEQ ID NO: 12194 - DNA, 20 bp, synthetic construct
  source 1..20: mol_type = other DNA
catgttgtggatgtactggg

SEQ ID NO: 12195 - DNA, 20 bp, synthetic construct
  source 1..20: mol_type = other DNA
tcacctttgtctttgtccag

SEQ ID NO: 12196 - DNA, 20 bp, synthetic construct
  source 1..20: mol_type = other DNA
tgatctagccttgtccttcc

SEQ ID NO: 12197 - DNA, 20 bp, synthetic construct
  source 1..20: mol_type = other DNA
tgagcttgctcgctcgggag

SEQ ID NO: 12198 - DNA, 20 bp, synthetic construct
  source 1..20: mol_type = other DNA
ggaccctgttgcaacagagc

SEQ ID NO: 12199 - DNA, 20 bp, synthetic construct
  source 1..20: mol_type = other DNA
aataaaagagcaggagggaa

SEQ ID NO: 12200 - DNA, 20 bp, synthetic construct
  source 1..20: mol_type = other DNA
cagtccaggattgtcagaca

SEQ ID NO: 12201 - DNA, 20 bp, synthetic construct
  source 1..20: mol_type = other DNA
acgttgcgtaggcgcaagct

SEQ ID NO: 12202 - DNA, 20 bp, synthetic construct
  source 1..20: mol_type = other DNA
aaggatgactgacgggatga

SEQ ID NO: 12203 - DNA, 20 bp, synthetic construct
  source 1..20: mol_type = other DNA
acccacatgggaatggacat

SEQ ID NO: 12204 - DNA, 20 bp, synthetic construct
  source 1..20: mol_type = other DNA
ttccagcgtcttgagctgtg

SEQ ID NO: 12205 - DNA, 20 bp, synthetic construct
  source 1..20: mol_type = other DNA
ggcaagtgcttcttatgaga

SEQ ID NO: 12206 - DNA, 20 bp, synthetic construct
  source 1..20: mol_type = other DNA
caggaaaggcacatttatca

SEQ ID NO: 12207 - DNA, 20 bp, synthetic construct
  source 1..20: mol_type = other DNA
caccatagatgaagaggatt

SEQ ID NO: 12208 - DNA, 20 bp, synthetic construct
  source 1..20: mol_type = other DNA
cgtcgtaggtgtccttggtg

SEQ ID NO: 12209 - DNA, 20 bp, synthetic construct
  source 1..20: mol_type = other DNA
gtatggttttcctcaggatc

SEQ ID NO: 12210 - DNA, 20 bp, synthetic construct
  source 1..20: mol_type = other DNA
cactgagactctcagtcatg

SEQ ID NO: 12211 - DNA, 20 bp, synthetic construct
  source 1..20: mol_type = other DNA
gcgaagggtttggaagagga

SEQ ID NO: 12212 - DNA, 20 bp, synthetic construct
  source 1..20: mol_type = other DNA
tatagcaagccaggactcca

SEQ ID NO: 12213 - DNA, 20 bp, synthetic construct
  source 1..20: mol_type = other DNA
acataggtaagcctagcctg

SEQ ID NO: 12214 - DNA, 20 bp, synthetic construct
  source 1..20: mol_type = other DNA
gggttggtttcctcttttga

SEQ ID NO: 12215 - DNA, 20 bp, synthetic construct
  source 1..20: mol_type = other DNA
atctacacatgacctgagag

SEQ ID NO: 12216 - DNA, 20 bp, synthetic construct
  source 1..20: mol_type = other DNA
accagtcaatctaaagccca

SEQ ID NO: 12217 - DNA, 20 bp, synthetic construct
  source 1..20: mol_type = other DNA
aacctgcctagcttgcttac

SEQ ID NO: 12218 - DNA, 20 bp, synthetic construct
  source 1..20: mol_type = other DNA
atttcacttctctgatgcct

SEQ ID NO: 12219 - DNA, 20 bp, synthetic construct
  source 1..20: mol_type = other DNA
aactctaaaaaccctggaca

SEQ ID NO: 12220 - DNA, 20 bp, synthetic construct
  source 1..20: mol_type = other DNA
atccattgagcatcacatgg

SEQ ID NO: 12221 - DNA, 20 bp, synthetic construct
  source 1..20: mol_type = other DNA
cgttgacacaaatggtgact

SEQ ID NO: 12222 - DNA, 20 bp, synthetic construct
  source 1..20: mol_type = other DNA
caacagagcttgtgtgtcgg

SEQ ID NO: 12223 - DNA, 20 bp, synthetic construct
  source 1..20: mol_type = other DNA
ggctgtactgagcatcatct

SEQ ID NO: 12224 - DNA, 20 bp, synthetic construct
  source 1..20: mol_type = other DNA
catcttctggtttgcttcct

SEQ ID NO: 12225 - DNA, 20 bp, synthetic construct
  source 1..20: mol_type = other DNA
catgggactgttactttact

SEQ ID NO: 12226 - DNA, 20 bp, synthetic construct
  source 1..20: mol_type = other DNA
attctctcgaatctaccggg

SEQ ID NO: 12227 - DNA, 20 bp, synthetic construct
  source 1..20: mol_type = other DNA
ataactgaatgtgagctgag

SEQ ID NO: 12228 - DNA, 20 bp, synthetic construct
  source 1..20: mol_type = other DNA
gggtagatgtcttcaggatt

SEQ ID NO: 12229 - DNA, 20 bp, synthetic construct
  source 1..20: mol_type = other DNA
aagagggatgccaagatgat

SEQ ID NO: 12230 - DNA, 20 bp, synthetic construct
  source 1..20: mol_type = other DNA
gaaatcagaagagggccatg

SEQ ID NO: 12231 - DNA, 20 bp, synthetic construct
  source 1..20: mol_type = other DNA
ggcgtatctgtgtgaggact

SEQ ID NO: 12232 - DNA, 20 bp, synthetic construct
  source 1..20: mol_type = other DNA
gcaactttcctgttttcgct

SEQ ID NO: 12233 - DNA, 20 bp, synthetic construct
  source 1..20: mol_type = other DNA
atgccgtaagaagcacttga

SEQ ID NO: 12234 - DNA, 20 bp, synthetic construct
  source 1..20: mol_type = other DNA
tccgacacatcaaaggtgat

SEQ ID NO: 12235 - DNA, 20 bp, synthetic construct
  source 1..20: mol_type = other DNA
ttaaggtgtctcaggttctc

SEQ ID NO: 12236 - DNA, 20 bp, synthetic construct
  source 1..20: mol_type = other DNA
ccctagaggcagcgattaag

SEQ ID NO: 12237 - DNA, 20 bp, synthetic construct
  source 1..20: mol_type = other DNA
acagcatagagctcagtttc

SEQ ID NO: 12238 - DNA, 20 bp, synthetic construct
  source 1..20: mol_type = other DNA
ccgcttgaaagcgtcttttt

SEQ ID NO: 12239 - DNA, 20 bp, synthetic construct
  source 1..20: mol_type = other DNA
aatccaaggaatgtggtctg

SEQ ID NO: 12240 - DNA, 20 bp, synthetic construct
  source 1..20: mol_type = other DNA
gatacattgatacaagccct

SEQ ID NO: 12241 - DNA, 20 bp, synthetic construct
  source 1..20: mol_type = other DNA
cgcatttggaggatgtgatg

SEQ ID NO: 12242 - DNA, 20 bp, synthetic construct
  source 1..20: mol_type = other DNA
tctgcgggtagctctggcct

SEQ ID NO: 12243 - DNA, 20 bp, synthetic construct
  source 1..20: mol_type = other DNA
ccaagaatactgtgagggtg

SEQ ID NO: 12244 - DNA, 20 bp, synthetic construct
  source 1..20: mol_type = other DNA
gaagggaattgcttttcacg

SEQ ID NO: 12245 - DNA, 20 bp, synthetic construct
  source 1..20: mol_type = other DNA
tttggacaaggactgctgtt

SEQ ID NO: 12246 - DNA, 20 bp, synthetic construct
  source 1..20: mol_type = other DNA
aacttgctgttcaccaggat

SEQ ID NO: 12247 - DNA, 20 bp, synthetic construct
  source 1..20: mol_type = other DNA
gacacagtcaaagatgctct

SEQ ID NO: 12248 - DNA, 20 bp, synthetic construct
  source 1..20: mol_type = other DNA
tgacctcatccagtttccaa

SEQ ID NO: 12249 - DNA, 20 bp, synthetic construct
  source 1..20: mol_type = other DNA
aggaactggtgtaaaagccc

SEQ ID NO: 12250 - DNA, 20 bp, synthetic construct
  source 1..20: mol_type = other DNA
ttttcagttgagcaatccac

SEQ ID NO: 12251 - DNA, 20 bp, synthetic construct
  source 1..20: mol_type = other DNA
atgcctggttctgttgatag

SEQ ID NO: 12252 - DNA, 20 bp, synthetic construct
  source 1..20: mol_type = other DNA
cattgggcccactcccaccc

SEQ ID NO: 12253 - DNA, 20 bp, synthetic construct
  source 1..20: mol_type = other DNA
aatttgagccacagaggccg

SEQ ID NO: 12254 - DNA, 20 bp, synthetic construct
  source 1..20: mol_type = other DNA
ttccggaaggaaagcgccgt

SEQ ID NO: 12255 - DNA, 20 bp, synthetic construct
  source 1..20: mol_type = other DNA
cgtccgtagaaaggtagttg

SEQ ID NO: 12256 - DNA, 20 bp, synthetic construct
  source 1..20: mol_type = other DNA
ccgtgctgtagacgacaggc

SEQ ID NO: 12257 - DNA, 20 bp, synthetic construct
  source 1..20: mol_type = other DNA
cgataatctagcaacagacg

SEQ ID NO: 12258 - DNA, 20 bp, synthetic construct
  source 1..20: mol_type = other DNA
ggcagatatgaaaggcatgg

SEQ ID NO: 12259 - DNA, 20 bp, synthetic construct
  source 1..20: mol_type = other DNA
tatattcggttcccggttcc

SEQ ID NO: 12260 - DNA, 20 bp, synthetic construct
  source 1..20: mol_type = other DNA
gggaacttgaaggcagccac

SEQ ID NO: 12261 - DNA, 20 bp, synthetic construct
  source 1..20: mol_type = other DNA
ggtcgcatgttgtggaactt

SEQ ID NO: 12262 - DNA, 20 bp, synthetic construct
  source 1..20: mol_type = other DNA
cttgaccgtcgatgttaaaa

SEQ ID NO: 12263 - DNA, 20 bp, synthetic construct
  source 1..20: mol_type = other DNA
tcgctctgtctcgctctccc

SEQ ID NO: 12264 - DNA, 20 bp, synthetic construct
  source 1..20: mol_type = other DNA
tcgcgccatcgtgacctccc

SEQ ID NO: 12265 - DNA, 20 bp, synthetic construct
  source 1..20: mol_type = other DNA
ggcccgaggaaacgcagatc

SEQ ID NO: 12266 - DNA, 20 bp, synthetic construct
  source 1..20: mol_type = other DNA
ggcatctccgattctccagt

SEQ ID NO: 12267 - DNA, 20 bp, synthetic construct
  source 1..20: mol_type = other DNA
tcataaagttcacacctgca

SEQ ID NO: 12268 - DNA, 20 bp, synthetic construct
  source 1..20: mol_type = other DNA
tattcattccaatcacaggg

SEQ ID NO: 12269 - DNA, 20 bp, synthetic construct
  source 1..20: mol_type = other DNA
ggttcctggtttcacatcgt

SEQ ID NO: 12270 - DNA, 20 bp, synthetic construct
  source 1..20: mol_type = other DNA
agttagtagcgtttcatggt

SEQ ID NO: 12271 - DNA, 20 bp, synthetic construct
  source 1..20: mol_type = other DNA
acgttcacactggcagtcct

SEQ ID NO: 12272 - DNA, 20 bp, synthetic construct
  source 1..20: mol_type = other DNA
gcaagatcatgcctatagtt

SEQ ID NO: 12273 - DNA, 20 bp, synthetic construct
  source 1..20: mol_type = other DNA
tgatgtccgccatactggat

SEQ ID NO: 12274 - DNA, 20 bp, synthetic construct
  source 1..20: mol_type = other DNA
atctagagtcccgtaactca

SEQ ID NO: 12275 - DNA, 20 bp, synthetic construct
  source 1..20: mol_type = other DNA
aaaggttgtgagggttgctg

SEQ ID NO: 12276 - DNA, 20 bp, synthetic construct
  source 1..20: mol_type = other DNA
ttgatgatgaagatggtccc

SEQ ID NO: 12277 - DNA, 20 bp, synthetic construct
  source 1..20: mol_type = other DNA
tgggctctctcagttccaca

SEQ ID NO: 12278 - DNA, 20 bp, synthetic construct
  source 1..20: mol_type = other DNA
ttctccaagcaagaagctat

SEQ ID NO: 12279 - DNA, 20 bp, synthetic construct
  source 1..20: mol_type = other DNA
ttaaagcactggctcagatt

SEQ ID NO: 12280 - DNA, 20 bp, synthetic construct
  source 1..20: mol_type = other DNA
tatttggaagcaccaggcat

SEQ ID NO: 12281 - DNA, 20 bp, synthetic construct
  source 1..20: mol_type = other DNA
gtactcgccttggcgccact

SEQ ID NO: 12282 - DNA, 20 bp, synthetic construct
  source 1..20: mol_type = other DNA
tggtcaccttgtaggtcgtg

SEQ ID NO: 12283 - DNA, 20 bp, synthetic construct
  source 1..20: mol_type = other DNA
tatacacagcaaagcagtgt

SEQ ID NO: 12284 - DNA, 20 bp, synthetic construct
  source 1..20: mol_type = other DNA
acattcatacccatttcctc

SEQ ID NO: 12285 - DNA, 20 bp, synthetic construct
  source 1..20: mol_type = other DNA
actgatttgggatgggtgtc

SEQ ID NO: 12286 - DNA, 20 bp, synthetic construct
  source 1..20: mol_type = other DNA
atgtctgggtcttggttctc

SEQ ID NO: 12287 - DNA, 20 bp, synthetic construct
  source 1..20: mol_type = other DNA
gtctgtcttgtggtttggtt

SEQ ID NO: 12288 - DNA, 20 bp, synthetic construct
  source 1..20: mol_type = other DNA
caagtgttacctctgaagct

SEQ ID NO: 12289 - DNA, 20 bp, synthetic construct
  source 1..20: mol_type = other DNA
tggcggcactttgcctccca

SEQ ID NO: 12290 - DNA, 20 bp, synthetic construct
  source 1..20: mol_type = other DNA
acagattcttttccttgagg

SEQ ID NO: 12291 - DNA, 20 bp, synthetic construct
  source 1..20: mol_type = other DNA
aggctatagccgtactcaaa

SEQ ID NO: 12292 - DNA, 20 bp, synthetic construct
  source 1..20: mol_type = other DNA
acgagtggctagagtttcct

SEQ ID NO: 12293 - DNA, 20 bp, synthetic construct
  source 1..20: mol_type = other DNA
ccagtctctatcggagtcag

SEQ ID NO: 12294 - DNA, 20 bp, synthetic construct
  source 1..20: mol_type = other DNA
gggtcgtaagtaaagtacac

SEQ ID NO: 12295 - DNA, 20 bp, synthetic construct
  source 1..20: mol_type = other DNA
acactaagatgatgaagcca

SEQ ID NO: 12296 - DNA, 20 bp, synthetic construct
  source 1..20: mol_type = other DNA
tcaaatctgttctggaggta

SEQ ID NO: 12297 - DNA, 20 bp, synthetic construct
  source 1..20: mol_type = other DNA
cggtaagctacatcgtgcat

SEQ ID NO: 12298 - DNA, 20 bp, synthetic construct
  source 1..20: mol_type = other DNA
atgcagttgggtggtagcag

SEQ ID NO: 12299 - DNA, 20 bp, synthetic construct
  source 1..20: mol_type = other DNA
aaagttggccttccacgtct

SEQ ID NO: 12300 - DNA, 20 bp, synthetic construct
  source 1..20: mol_type = other DNA
cgttaaacaagatctcagct

SEQ ID NO: 12301 - DNA, 20 bp, synthetic construct
  source 1..20: mol_type = other DNA
tgtcacactggattctctgg

SEQ ID NO: 12302 - DNA, 20 bp, synthetic construct
  source 1..20: mol_type = other DNA
acgtttgtcaatgtaaaggc

SEQ ID NO: 12303 - DNA, 20 bp, synthetic construct
  source 1..20: mol_type = other DNA
ggttcaggcagccctcagtg

SEQ ID NO: 12304 - DNA, 20 bp, synthetic construct
  source 1..20: mol_type = other DNA
gttggtcagcttcagcacgt

SEQ ID NO: 12305 - DNA, 20 bp, synthetic construct
  source 1..20: mol_type = other DNA
attagtcaggatagcaggca

SEQ ID NO: 12306 - DNA, 20 bp, synthetic construct
  source 1..20: mol_type = other DNA
gcctgtcgtaagtcaggatt

SEQ ID NO: 12307 - DNA, 20 bp, synthetic construct
  source 1..20: mol_type = other DNA
ctcgttagatgaagttcact

SEQ ID NO: 12308 - DNA, 20 bp, synthetic construct
  source 1..20: mol_type = other DNA
cagtttaagagacccggtct

SEQ ID NO: 12309 - DNA, 20 bp, synthetic construct
  source 1..20: mol_type = other DNA
aggctggatttctgagaagc

SEQ ID NO: 12310 - DNA, 20 bp, synthetic construct
  source 1..20: mol_type = other DNA
ttttagcaatactccctgag

SEQ ID NO: 12311 - DNA, 20 bp, synthetic construct
  source 1..20: mol_type = other DNA
cgaagggtaaagtcgccatt

SEQ ID NO: 12312 - DNA, 20 bp, synthetic construct
  source 1..20: mol_type = other DNA
tgtacctcaccctccactta

SEQ ID NO: 12313 - DNA, 20 bp, synthetic construct
  source 1..20: mol_type = other DNA
gctacacaatcattccgttc

SEQ ID NO: 12314 - DNA, 20 bp, synthetic construct
  source 1..20: mol_type = other DNA
cccacagaatggaagttcca

SEQ ID NO: 12315 - DNA, 20 bp, synthetic construct
  source 1..20: mol_type = other DNA
ttggatgctagctgcggagt

SEQ ID NO: 12316 - DNA, 20 bp, synthetic construct
  source 1..20: mol_type = other DNA
tcccaaaatcattctcagag

SEQ ID NO: 12317 - DNA, 20 bp, synthetic construct
  source 1..20: mol_type = other DNA
ttggaatgccatacttcttc

SEQ ID NO: 12318 - DNA, 20 bp, synthetic construct
  source 1..20: mol_type = other DNA
ggttttggtctgtccacggc

SEQ ID NO: 12319 - DNA, 20 bp, synthetic construct
  source 1..20: mol_type = other DNA
gctgaaggtctgcgtcacgt

SEQ ID NO: 12320 - DNA, 20 bp, synthetic construct
  source 1..20: mol_type = other DNA
tggtggcatactccgtctgc

SEQ ID NO: 12321 - DNA, 20 bp, synthetic construct
  source 1..20: mol_type = other DNA
tcacaaggtccatctatttg

SEQ ID NO: 12322 - DNA, 20 bp, synthetic construct
  source 1..20: mol_type = other DNA
gttacttggtcgttcaagtc

SEQ ID NO: 12323 - DNA, 20 bp, synthetic construct
  source 1..20: mol_type = other DNA
tcaagtaagcgtaggagtcc

SEQ ID NO: 12324 - DNA, 20 bp, synthetic construct
  source 1..20: mol_type = other DNA
tgctgaagctgtactggtcc

SEQ ID NO: 12325 - DNA, 20 bp, synthetic construct
  source 1..20: mol_type = other DNA
gcaaagcattgtgggcaaag

SEQ ID NO: 12326 - DNA, 20 bp, synthetic construct
  source 1..20: mol_type = other DNA
cactagcctctttgcatcca

SEQ ID NO: 12327 - DNA, 20 bp, synthetic construct
  source 1..20: mol_type = other DNA
ctcaagtgttgcacataatc

SEQ ID NO: 12328 - DNA, 20 bp, synthetic construct
  source 1..20: mol_type = other DNA
tctgggtgctctgacatttc

SEQ ID NO: 12329 - DNA, 20 bp, synthetic construct
  source 1..20: mol_type = other DNA
tgcactgaaggaaacacact

SEQ ID NO: 12330 - DNA, 20 bp, synthetic construct
  source 1..20: mol_type = other DNA
ctggttgtagaactcctcga

SEQ ID NO: 12331 - DNA, 20 bp, synthetic construct
  source 1..20: mol_type = other DNA
taatcagggcattctgggta

SEQ ID NO: 12332 - DNA, 20 bp, synthetic construct
  source 1..20: mol_type = other DNA
ctctccgcaactatagtgaa

SEQ ID NO: 12333 - DNA, 20 bp, synthetic construct
  source 1..20: mol_type = other DNA
tcattgttagaagctgcctc

SEQ ID NO: 12334 - DNA, 20 bp, synthetic construct
  source 1..20: mol_type = other DNA
catacacacttggagacatg

SEQ ID NO: 12335 - DNA, 20 bp, synthetic construct
  source 1..20: mol_type = other DNA
cgaggagcttggaaaggagg

SEQ ID NO: 12336 - DNA, 20 bp, synthetic construct
  source 1..20: mol_type = other DNA
ggcccgtaaagaatggaatg

SEQ ID NO: 12337 - DNA, 20 bp, synthetic construct
  source 1..20: mol_type = other DNA
ggctggtacttatggaggga

SEQ ID NO: 12338 - DNA, 20 bp, synthetic construct
  source 1..20: mol_type = other DNA
ccagaatctaagtcaaggat

SEQ ID NO: 12339 - DNA, 20 bp, synthetic construct
  source 1..20: mol_type = other DNA
tagtaaacgaaggtgaacag

SEQ ID NO: 12340 - DNA, 20 bp, synthetic construct
  source 1..20: mol_type = other DNA
ttcatgccatgaatggtggc

SEQ ID NO: 12341 - DNA, 20 bp, synthetic construct
  source 1..20: mol_type = other DNA
atgaggaatgtgtctctcag

SEQ ID NO: 12342 - DNA, 20 bp, synthetic construct
  source 1..20: mol_type = other DNA
gccagaagctggtcctgctg

SEQ ID NO: 12343 - DNA, 20 bp, synthetic construct
  source 1..20: mol_type = other DNA
taggtgatcctgttgttgga

SEQ ID NO: 12344 - DNA, 20 bp, synthetic construct
  source 1..20: mol_type = other DNA
gcatgctttgggaccaaaag

SEQ ID NO: 12345 - DNA, 20 bp, synthetic construct
  source 1..20: mol_type = other DNA
aaactcaaggcttggtagat

SEQ ID NO: 12346 - DNA, 20 bp, synthetic construct
  source 1..20: mol_type = other DNA
aatcaagaaaaggtgacctc

SEQ ID NO: 12347 - DNA, 20 bp, synthetic construct
  source 1..20: mol_type = other DNA
agtcgaccttcggtttgctc

SEQ ID NO: 12348 - DNA, 20 bp, synthetic construct
  source 1..20: mol_type = other DNA
agctgtatcggcaactgaaa

SEQ ID NO: 12349 - DNA, 20 bp, synthetic construct
  source 1..20: mol_type = other DNA
ctgccaaggtttttattgtg

SEQ ID NO: 12350 - DNA, 20 bp, synthetic construct
  source 1..20: mol_type = other DNA
caagaaagaaggagatgatc

SEQ ID NO: 12351 - DNA, 20 bp, synthetic construct
  source 1..20: mol_type = other DNA
gggatacttacatgacactt

SEQ ID NO: 12352 - DNA, 20 bp, synthetic construct
  source 1..20: mol_type = other DNA
tagatgtcccatggcgtagg

SEQ ID NO: 12353 - DNA, 20 bp, synthetic construct
  source 1..20: mol_type = other DNA
cactacttgaactttgaagg

SEQ ID NO: 12354 - DNA, 20 bp, synthetic construct
  source 1..20: mol_type = other DNA
ccaagtatcacacaggaggt

SEQ ID NO: 12355 - DNA, 20 bp, synthetic construct
  source 1..20: mol_type = other DNA
tagtcgggccgattgatctc

SEQ ID NO: 12356 - DNA, 20 bp, synthetic construct
  source 1..20: mol_type = other DNA
gtttcgaagtggtggtcttg

SEQ ID NO: 12357 - DNA, 20 bp, synthetic construct
  source 1..20: mol_type = other DNA
agttgctgtcgtgatgagaa

SEQ ID NO: 12358 - DNA, 20 bp, synthetic construct
  source 1..20: mol_type = other DNA
cttactgtgggcacagaatc

SEQ ID NO: 12359 - DNA, 20 bp, synthetic construct
  source 1..20: mol_type = other DNA
acccaagacagcagaaagtt

SEQ ID NO: 12360 - DNA, 20 bp, synthetic construct
  source 1..20: mol_type = other DNA
ttcccaaaactgggtcatat

SEQ ID NO: 12361 - DNA, 20 bp, synthetic construct
  source 1..20: mol_type = other DNA
tgtcaccagacgcggtgtga

SEQ ID NO: 12362 - DNA, 20 bp, synthetic construct
  source 1..20: mol_type = other DNA
agaaaagcagcaggcggtgg

SEQ ID NO: 12363 - DNA, 20 bp, synthetic construct
  source 1..20: mol_type = other DNA
gctgcaactgaagctctgcc

SEQ ID NO: 12364 - DNA, 20 bp, synthetic construct
  source 1..20: mol_type = other DNA
tctgaatctgggcttggagg

SEQ ID NO: 12365 - DNA, 20 bp, synthetic construct
  source 1..20: mol_type = other DNA
ttggagatggtccagttctg

SEQ ID NO: 12366 - DNA, 20 bp, synthetic construct
  source 1..20: mol_type = other DNA
ggctctgagttctatgtttc

SEQ ID NO: 12367 - DNA, 20 bp, synthetic construct
  source 1..20: mol_type = other DNA
cacgtgaaggtgagctcatc

SEQ ID NO: 12368 - DNA, 20 bp, synthetic construct
  source 1..20: mol_type = other DNA
caaggagctgttctgtggga

SEQ ID NO: 12369 - DNA, 20 bp, synthetic construct
  source 1..20: mol_type = other DNA
cgtgaggttcgcttctgaac

SEQ ID NO: 12370 - DNA, 20 bp, synthetic construct
  source 1..20: mol_type = other DNA
gtcttcgtggctcacgtcca

SEQ ID NO: 12371 - DNA, 20 bp, synthetic construct
  source 1..20: mol_type = other DNA
ccttcgcagctctcggaagc

SEQ ID NO: 12372 - DNA, 20 bp, synthetic construct
  source 1..20: mol_type = other DNA
ttgcttttgccatcgtgttg

SEQ ID NO: 12373 - DNA, 20 bp, synthetic construct
  source 1..20: mol_type = other DNA
gagtctaagaaatctgacag

SEQ ID NO: 12374 - DNA, 20 bp, synthetic construct
  source 1..20: mol_type = other DNA
ggcgcgttccaggtctctcc

SEQ ID NO: 12375 - DNA, 20 bp, synthetic construct
  source 1..20: mol_type = other DNA
gttccgtgacagatccaagg

SEQ ID NO: 12376 - DNA, 20 bp, synthetic construct
  source 1..20: mol_type = other DNA
actgacccggtccgtgtggg

SEQ ID NO: 12377 - DNA, 20 bp, synthetic construct
  source 1..20: mol_type = other DNA
tttggccacctttccctgcc

SEQ ID NO: 12378 - DNA, 20 bp, synthetic construct
  source 1..20: mol_type = other DNA
gaaccagcctcttctgtgtc

SEQ ID NO: 12379 - DNA, 20 bp, synthetic construct
  source 1..20: mol_type = other DNA
tgaccatcattggtcacctt

SEQ ID NO: 12380 - DNA, 20 bp, synthetic construct
  source 1..20: mol_type = other DNA
gaagtgatgggagaggcagc

SEQ ID NO: 12381 - DNA, 20 bp, synthetic construct
  source 1..20: mol_type = other DNA
ttcgatttgggatttaggca

SEQ ID NO: 12382 - DNA, 20 bp, synthetic construct
  source 1..20: mol_type = other DNA
cctttcatccttcacataac

SEQ ID NO: 12383 - DNA, 20 bp, synthetic construct
  source 1..20: mol_type = other DNA
gtgagtttttaagcagagga

SEQ ID NO: 12384 - DNA, 20 bp, synthetic construct
  source 1..20: mol_type = other DNA
ctgggtttagacatgtttga

SEQ ID NO: 12385 - DNA, 20 bp, synthetic construct
  source 1..20: mol_type = other DNA
taggaggcctctgaggtctc

SEQ ID NO: 12386 - DNA, 20 bp, synthetic construct
  source 1..20: mol_type = other DNA
taccctgctttctcggccac

SEQ ID NO: 12387 - DNA, 20 bp, synthetic construct
  source 1..20: mol_type = other DNA
ccaacaggcgaagaaagcca

SEQ ID NO: 12388 - DNA, 20 bp, synthetic construct
  source 1..20: mol_type = other DNA
gccaaccatgatgtgctgaa

SEQ ID NO: 12389 - DNA, 20 bp, synthetic construct
  source 1..20: mol_type = other DNA
cttcctcgttgtcctgccgt

SEQ ID NO: 12390 - DNA, 20 bp, synthetic construct
  source 1..20: mol_type = other DNA
gtttttagggactgagttgt

SEQ ID NO: 12391 - DNA, 20 bp, synthetic construct
  source 1..20: mol_type = other DNA
tctgcctctacttctgtgat

SEQ ID NO: 12392 - DNA, 20 bp, synthetic construct
  source 1..20: mol_type = other DNA
acgatgaggttacctttcct

SEQ ID NO: 12393 - DNA, 20 bp, synthetic construct
  source 1..20: mol_type = other DNA
ggaattcgctccactgtgtt

SEQ ID NO: 12394 - DNA, 20 bp, synthetic construct
  source 1..20: mol_type = other DNA
gtcccaaacagttttttcca

SEQ ID NO: 12395 - DNA, 20 bp, synthetic construct
  source 1..20: mol_type = other DNA
ctaccatacaaccacgcagt

SEQ ID NO: 12396 - DNA, 20 bp, synthetic construct
  source 1..20: mol_type = other DNA
gcgggaaacggatacgcctt

SEQ ID NO: 12397 - DNA, 20 bp, synthetic construct
  source 1..20: mol_type = other DNA
gaagtggagcatcgttagct

SEQ ID NO: 12398 - DNA, 20 bp, synthetic construct
  source 1..20: mol_type = other DNA
ctgttacgtgtaacgccatt

SEQ ID NO: 12399 - DNA, 20 bp, synthetic construct
  source 1..20: mol_type = other DNA
cacagttgaggttatctctg

SEQ ID NO: 12400 - DNA, 20 bp, synthetic construct
  source 1..20: mol_type = other DNA
gacgcgacgcataaaaagcg

SEQ ID NO: 12401 - DNA, 20 bp, synthetic construct
  source 1..20: mol_type = other DNA
gtcaggctatgattcaccac

SEQ ID NO: 12402 - DNA, 20 bp, synthetic construct
  source 1..20: mol_type = other DNA
tacgggccttcgcaatcgcg

SEQ ID NO: 12403 - DNA, 20 bp, synthetic construct
  source 1..20: mol_type = other DNA
aatgtcccgtctcgagctgg

SEQ ID NO: 12404 - DNA, 20 bp, synthetic construct
  source 1..20: mol_type = other DNA
gtgaacttcgcccacaggct

SEQ ID NO: 12405 - DNA, 20 bp, synthetic construct
  source 1..20: mol_type = other DNA
ctctctttgaaggcaggttg

SEQ ID NO: 12406 - DNA, 20 bp, synthetic construct
  source 1..20: mol_type = other DNA
caggcccacaggatattcat

SEQ ID NO: 12407 - DNA, 20 bp, synthetic construct
  source 1..20: mol_type = other DNA
cttcagaattcctccatggg

SEQ ID NO: 12408 - DNA, 20 bp, synthetic construct
  source 1..20: mol_type = other DNA
tctataaaagggcacagtct

SEQ ID NO: 12409 - DNA, 20 bp, synthetic construct
  source 1..20: mol_type = other DNA
tccctgtaagtcctttaagg

SEQ ID NO: 12410 - DNA, 20 bp, synthetic construct
  source 1..20: mol_type = other DNA
tccgcgtttgctccgctgtt

SEQ ID NO: 12411 - DNA, 20 bp, synthetic construct
  source 1..20: mol_type = other DNA
catcattatggccttgctgg

SEQ ID NO: 12412 - DNA, 20 bp, synthetic construct
  source 1..20: mol_type = other DNA
tttctgggaccttctttact

SEQ ID NO: 12413 - DNA, 20 bp, synthetic construct
  source 1..20: mol_type = other DNA
tctagctgaaaccgtgggcc

SEQ ID NO: 12414 - DNA, 20 bp, synthetic construct
  source 1..20: mol_type = other DNA
ccaaggtcaggcagtaagtc

SEQ ID NO: 12415 - DNA, 20 bp, synthetic construct
  source 1..20: mol_type = other DNA
gcatgtcagacccagggtgc

SEQ ID NO: 12416 - DNA, 20 bp, synthetic construct
  source 1..20: mol_type = other DNA
ttggagacattctacagaga

SEQ ID NO: 12417 - DNA, 20 bp, synthetic construct
  source 1..20: mol_type = other DNA
gtagtaacagggtacggaac

SEQ ID NO: 12418 - DNA, 20 bp, synthetic construct
  source 1..20: mol_type = other DNA
caaatggcacagatgacatt

SEQ ID NO: 12419 - DNA, 20 bp, synthetic construct
  source 1..20: mol_type = other DNA
gggatgaagtcagctgggtt

SEQ ID NO: 12420 - DNA, 20 bp, synthetic construct
  source 1..20: mol_type = other DNA
ggtattccatcatctcctgc

SEQ ID NO: 12421 - DNA, 20 bp, synthetic construct
  source 1..20: mol_type = other DNA
tgagtacgttttgacacaac

SEQ ID NO: 12422 - DNA, 20 bp, synthetic construct
  source 1..20: mol_type = other DNA
catgagcatgatatggcaga

SEQ ID NO: 12423 - DNA, 20 bp, synthetic construct
  source 1..20: mol_type = other DNA
tctctgcagaagaactcctg

SEQ ID NO: 12424 - DNA, 20 bp, synthetic construct
  source 1..20: mol_type = other DNA
ggcagcattctctttcacaa

SEQ ID NO: 12425 - DNA, 20 bp, synthetic construct
  source 1..20: mol_type = other DNA
atcacgaaaatagagccttc

SEQ ID NO: 12426 - DNA, 20 bp, synthetic construct
  source 1..20: mol_type = other DNA
cacttcttgcttggaggata

SEQ ID NO: 12427 - DNA, 20 bp, synthetic construct
  source 1..20: mol_type = other DNA
gcagcgagcagtccttctga

SEQ ID NO: 12428 - DNA, 20 bp, synthetic construct
  source 1..20: mol_type = other DNA
acacagacatttgaagctgc

SEQ ID NO: 12429 - DNA, 20 bp, synthetic construct
  source 1..20: mol_type = other DNA
cactggcactggaaagaccc

SEQ ID NO: 12430 - DNA, 20 bp, synthetic construct
  source 1..20: mol_type = other DNA
ttcttgtgtcggccgatcag

SEQ ID NO: 12431 - DNA, 20 bp, synthetic construct
  source 1..20: mol_type = other DNA
gtcccattcgttgtaagaag

SEQ ID NO: 12432 - DNA, 20 bp, synthetic construct
  source 1..20: mol_type = other DNA
gcagctctgagtacaggtcc

SEQ ID NO: 12433 - DNA, 20 bp, synthetic construct
  source 1..20: mol_type = other DNA
ggttcaaaacgaaagcaagt

SEQ ID NO: 12434 - DNA, 20 bp, synthetic construct
  source 1..20: mol_type = other DNA
cgcaagtgatgcccggcgca

SEQ ID NO: 12435 - DNA, 20 bp, synthetic construct
  source 1..20: mol_type = other DNA
ggccctcattctagttcctt

SEQ ID NO: 12436 - DNA, 20 bp, synthetic construct
  source 1..20: mol_type = other DNA
agagatcctcattatcctga

SEQ ID NO: 12437 - DNA, 20 bp, synthetic construct
  source 1..20: mol_type = other DNA
aaggtcaactgggttgccgg

SEQ ID NO: 12438 - DNA, 20 bp, synthetic construct
  source 1..20: mol_type = other DNA
gggccacatcctgtcccacc

SEQ ID NO: 12439 - DNA, 20 bp, synthetic construct
  source 1..20: mol_type = other DNA
tgagataaacgcagatactg

SEQ ID NO: 12440 - DNA, 20 bp, synthetic construct
  source 1..20: mol_type = other DNA
ctcaagtcaaggtattcgag

SEQ ID NO: 12441 - DNA, 20 bp, synthetic construct
  source 1..20: mol_type = other DNA
ccctcttttcttctttactc

SEQ ID NO: 12442 - DNA, 20 bp, synthetic construct
  source 1..20: mol_type = other DNA
acgggttgggagggtggttc

SEQ ID NO: 12443 - DNA, 20 bp, synthetic construct
  source 1..20: mol_type = other DNA
gtcagcagtatgattgtggg

SEQ ID NO: 12444 - DNA, 20 bp, synthetic construct
  source 1..20: mol_type = other DNA
accagcaatcaatcctgtga

SEQ ID NO: 12445 - DNA, 20 bp, synthetic construct
  source 1..20: mol_type = other DNA
tcagaaagagcagcatcgat

SEQ ID NO: 12446 - DNA, 20 bp, synthetic construct
  source 1..20: mol_type = other DNA
gaagggatttgtgcgcatgt

SEQ ID NO: 12447 - DNA, 20 bp, synthetic construct
  source 1..20: mol_type = other DNA
tccttacatcattcacagtc

SEQ ID NO: 12448 - DNA, 20 bp, synthetic construct
  source 1..20: mol_type = other DNA
cactgtatccaggacagcac

SEQ ID NO: 12449 - DNA, 20 bp, synthetic construct
  source 1..20: mol_type = other DNA
ttgtagaatacagggtgtgg

SEQ ID NO: 12450 - DNA, 20 bp, synthetic construct
  source 1..20: mol_type = other DNA
gagcttctggcaattgcagt

SEQ ID NO: 12451 - DNA, 20 bp, synthetic construct
  source 1..20: mol_type = other DNA
gtagacacgttgagcttctg

SEQ ID NO: 12452 - DNA, 20 bp, synthetic construct
  source 1..20: mol_type = other DNA
gattgacataatcagccgat

SEQ ID NO: 12453 - DNA, 20 bp, synthetic construct
  source 1..20: mol_type = other DNA
tgcttggctattgaagattg

SEQ ID NO: 12454 - DNA, 20 bp, synthetic construct
  source 1..20: mol_type = other DNA
gtaatgaaagctggcagagg

SEQ ID NO: 12455 - DNA, 20 bp, synthetic construct
  source 1..20: mol_type = other DNA
aaagccacgttggtgatcat

SEQ ID NO: 12456 - DNA, 20 bp, synthetic construct
  source 1..20: mol_type = other DNA
aagtcaaggcctgtgcagct

SEQ ID NO: 12457 - DNA, 20 bp, synthetic construct
  source 1..20: mol_type = other DNA
cgagtagaaatacggttcat

SEQ ID NO: 12458 - DNA, 20 bp, synthetic construct
  source 1..20: mol_type = other DNA
cattttgcaccgtccagtcc

SEQ ID NO: 12459 - DNA, 20 bp, synthetic construct
  source 1..20: mol_type = other DNA
gccttttcctctgggacaga

SEQ ID NO: 12460 - DNA, 20 bp, synthetic construct
  source 1..20: mol_type = other DNA
caccatatcatacagcagga

SEQ ID NO: 12461 - DNA, 20 bp, synthetic construct
  source 1..20: mol_type = other DNA
cggagttttactaaaggagg

SEQ ID NO: 12462 - DNA, 20 bp, synthetic construct
  source 1..20: mol_type = other DNA
ttccgcagtgtctctggcca

SEQ ID NO: 12463 - DNA, 20 bp, synthetic construct
  source 1..20: mol_type = other DNA
gtggtggttttcaatgaagg

SEQ ID NO: 12464 - DNA, 20 bp, synthetic construct
  source 1..20: mol_type = other DNA
tgttgaagggcacagacatt

SEQ ID NO: 12465 - DNA, 20 bp, synthetic construct
  source 1..20: mol_type = other DNA
atccttcttcagttccggag

SEQ ID NO: 12466 - DNA, 20 bp, synthetic construct
  source 1..20: mol_type = other DNA
cagggttcttgcatcaagct

SEQ ID NO: 12467 - DNA, 20 bp, synthetic construct
  source 1..20: mol_type = other DNA
ctagctctggactgcttgat

SEQ ID NO: 12468 - DNA, 20 bp, synthetic construct
  source 1..20: mol_type = other DNA
acatccattgtaatctgagc

SEQ ID NO: 12469 - DNA, 20 bp, synthetic construct
  source 1..20: mol_type = other DNA
ttgagtcaaacacatgggaa

SEQ ID NO: 12470 - DNA, 20 bp, synthetic construct
  source 1..20: mol_type = other DNA
aaatgaacccagcctctggc

SEQ ID NO: 12471 - DNA, 20 bp, synthetic construct
  source 1..20: mol_type = other DNA
tgaaacccaccaggcacaca

SEQ ID NO: 12472 - DNA, 20 bp, synthetic construct
  source 1..20: mol_type = other DNA
caggatgatttgaaggtgaa

SEQ ID NO: 12473 - DNA, 20 bp, synthetic construct
  source 1..20: mol_type = other DNA
tggcctcatcataagtcata

SEQ ID NO: 12474 - DNA, 20 bp, synthetic construct
  source 1..20: mol_type = other DNA
gtgcataccaaaacacactt

SEQ ID NO: 12475 - DNA, 20 bp, synthetic construct
  source 1..20: mol_type = other DNA
ttcccgggaacccacttttt

SEQ ID NO: 12476 - DNA, 20 bp, synthetic construct
  source 1..20: mol_type = other DNA
ctagtgtcttcagcctgccg

SEQ ID NO: 12477 - DNA, 20 bp, synthetic construct
  source 1..20: mol_type = other DNA
gagggtactttctcctgagg

SEQ ID NO: 12478 - DNA, 20 bp, synthetic construct
  source 1..20: mol_type = other DNA
tacaatggctggagagttac

SEQ ID NO: 12479 - DNA, 20 bp, synthetic construct
  source 1..20: mol_type = other DNA
aggttgttgaggttgttgag

SEQ ID NO: 12480 - DNA, 20 bp, synthetic construct
  source 1..20: mol_type = other DNA
gaggcttggttttattgtgc

SEQ ID NO: 12481 - DNA, 20 bp, synthetic construct
  source 1..20: mol_type = other DNA
aagctaatcgtgttcctgga

SEQ ID NO: 12482 - DNA, 20 bp, synthetic construct
  source 1..20: mol_type = other DNA
agcggtaaagacccgcatca

SEQ ID NO: 12483 - DNA, 20 bp, synthetic construct
  source 1..20: mol_type = other DNA
gaaggtgacgttgaatgaaa

SEQ ID NO: 12484 - DNA, 20 bp, synthetic construct
  source 1..20: mol_type = other DNA
aagatgtgaccaaggtgatt

SEQ ID NO: 12485 - DNA, 20 bp, synthetic construct
  source 1..20: mol_type = other DNA
cactgcttgtctgtactgtc

SEQ ID NO: 12486 - DNA, 20 bp, synthetic construct
  source 1..20: mol_type = other DNA
cacatctgttttggttctct

SEQ ID NO: 12487 - DNA, 20 bp, synthetic construct
  source 1..20: mol_type = other DNA
atagtctgaggattacacct

SEQ ID NO: 12488 - DNA, 20 bp, synthetic construct
  source 1..20: mol_type = other DNA
caaacaccacacagctgtcc

SEQ ID NO: 12489 - DNA, 20 bp, synthetic construct
  source 1..20: mol_type = other DNA
ggttaccctggttttgacag

SEQ ID NO: 12490 - DNA, 20 bp, synthetic construct
  source 1..20: mol_type = other DNA
gagggtgggttctcgggcac

SEQ ID NO: 12491 - DNA, 20 bp, synthetic construct
  source 1..20: mol_type = other DNA
gtagaactgtggttcaagag

SEQ ID NO: 12492 - DNA, 20 bp, synthetic construct
  source 1..20: mol_type = other DNA
cccatttcttctctgggttg

SEQ ID NO: 12493 - DNA, 20 bp, synthetic construct
  source 1..20: mol_type = other DNA
caaagcagcgcctcagaagc

SEQ ID NO: 12494 - DNA, 20 bp, synthetic construct
  source 1..20: mol_type = other DNA
ctccttctttgtcctgaaga

SEQ ID NO: 12495 - DNA, 20 bp, synthetic construct
  source 1..20: mol_type = other DNA
tgtggcctgaaagtagagcc

SEQ ID NO: 12496 - DNA, 20 bp, synthetic construct
  source 1..20: mol_type = other DNA
ccgaagcagagtttttagga

SEQ ID NO: 12497 - DNA, 20 bp, synthetic construct
  source 1..20: mol_type = other DNA
ttgtagtgaagggaaggttt

SEQ ID NO: 12498 - DNA, 20 bp, synthetic construct
  source 1..20: mol_type = other DNA
aagacccaggacttggccgc

SEQ ID NO: 12499 - DNA, 20 bp, synthetic construct
  source 1..20: mol_type = other DNA
cttgttgcgctcaaagttgc

SEQ ID NO: 12500 - DNA, 20 bp, synthetic construct
  source 1..20: mol_type = other DNA
ctctaggttgagaccgccgg

SEQ ID NO: 12501 - DNA, 20 bp, synthetic construct
  source 1..20: mol_type = other DNA
tcgcagagacgtgcaccagc

SEQ ID NO: 12502 - DNA, 20 bp, synthetic construct
  source 1..20: mol_type = other DNA
catgtgtttgttgcctggat

SEQ ID NO: 12503 - DNA, 20 bp, synthetic construct
  source 1..20: mol_type = other DNA
agccatatcggtccagtccc

SEQ ID NO: 12504 - DNA, 20 bp, synthetic construct
  source 1..20: mol_type = other DNA
ttacccacatatctctggcc

SEQ ID NO: 12505 - DNA, 20 bp, synthetic construct
  source 1..20: mol_type = other DNA
tgattgagtagatgacagac

SEQ ID NO: 12506 - DNA, 20 bp, synthetic construct
  source 1..20: mol_type = other DNA
catcacatgtaacttgcaca

SEQ ID NO: 12507 - DNA, 20 bp, synthetic construct
  source 1..20: mol_type = other DNA
tttccatccatggcctgtgc

SEQ ID NO: 12508 - DNA, 20 bp, synthetic construct
  source 1..20: mol_type = other DNA
ttacagcaggagtgaagcca

SEQ ID NO: 12509 - DNA, 20 bp, synthetic construct
  source 1..20: mol_type = other DNA
gttcagaggtgactggatcc

SEQ ID NO: 12510 - DNA, 20 bp, synthetic construct
  source 1..20: mol_type = other DNA
agggattctcaacccgtctt

SEQ ID NO: 12511 - DNA, 20 bp, synthetic construct
  source 1..20: mol_type = other DNA
agcacacgaaagccagggcc

SEQ ID NO: 12512 - DNA, 20 bp, synthetic construct
  source 1..20: mol_type = other DNA
atggtgcagttgcgaacgag

SEQ ID NO: 12513 - DNA, 20 bp, synthetic construct
  source 1..20: mol_type = other DNA
ccatatacaacacagacttc

SEQ ID NO: 12514 - DNA, 20 bp, synthetic construct
  source 1..20: mol_type = other DNA
ctttgcttgactgagatgtg

SEQ ID NO: 12515 - DNA, 20 bp, synthetic construct
  source 1..20: mol_type = other DNA
agatagatgtccagaccttt

SEQ ID NO: 12516 - DNA, 20 bp, synthetic construct
  source 1..20: mol_type = other DNA
accctctgagaaagttttag

SEQ ID NO: 12517 - DNA, 20 bp, synthetic construct
  source 1..20: mol_type = other DNA
ccgacctgtagaggatgtgg

SEQ ID NO: 12518 - DNA, 20 bp, synthetic construct
  source 1..20: mol_type = other DNA
aaggttaaggagcttgtgtg

SEQ ID NO: 12519 - DNA, 20 bp, synthetic construct
  source 1..20: mol_type = other DNA
tggttgaaaggtctgaaaca

SEQ ID NO: 12520 - DNA, 20 bp, synthetic construct
  source 1..20: mol_type = other DNA
gctgaatggccgtttctgga

SEQ ID NO: 12521 - DNA, 20 bp, synthetic construct
  source 1..20: mol_type = other DNA
taaactcccacaaggatgtc

SEQ ID NO: 12522 - DNA, 20 bp, synthetic construct
  source 1..20: mol_type = other DNA
actggctcagatctcagatg

SEQ ID NO: 12523 - DNA, 20 bp, synthetic construct
  source 1..20: mol_type = other DNA
tctataggtatcttgaaggg

SEQ ID NO: 12524 - DNA, 20 bp, synthetic construct
  source 1..20: mol_type = other DNA
agttggtaatggctgcttct

SEQ ID NO: 12525 - DNA, 20 bp, synthetic construct
  source 1..20: mol_type = other DNA
ggcatgtcaatattactgtg

SEQ ID NO: 12526 - DNA, 20 bp, synthetic construct
  source 1..20: mol_type = other DNA
gaatacaggtcccgctggcc

SEQ ID NO: 12527 - DNA, 20 bp, synthetic construct
  source 1..20: mol_type = other DNA
cgaagcacctggttgcaatt

SEQ ID NO: 12528 - DNA, 20 bp, synthetic construct
  source 1..20: mol_type = other DNA
actgcaggtagatacaatag

SEQ ID NO: 12529 - DNA, 20 bp, synthetic construct
  source 1..20: mol_type = other DNA
cctgtccaaatcttccacca

SEQ ID NO: 12530 - DNA, 20 bp, synthetic construct
  source 1..20: mol_type = other DNA
gctccatcaaaggtgtaaat

SEQ ID NO: 12531 - DNA, 20 bp, synthetic construct
  source 1..20: mol_type = other DNA
gtcgtgcttaaatgaagaga

SEQ ID NO: 12532 - DNA, 20 bp, synthetic construct
  source 1..20: mol_type = other DNA
aaattctctgagatggaccc

SEQ ID NO: 12533 - DNA, 20 bp, synthetic construct
  source 1..20: mol_type = other DNA
acacgagctgagttaatggg

SEQ ID NO: 12534 - DNA, 20 bp, synthetic construct
  source 1..20: mol_type = other DNA
tggaagtgaaagctacaaag

SEQ ID NO: 12535 - DNA, 20 bp, synthetic construct
  source 1..20: mol_type = other DNA
gaagtgagctgagacactgg

SEQ ID NO: 12536 - DNA, 20 bp, synthetic construct
  source 1..20: mol_type = other DNA
agccaggatcacaatggaga

SEQ ID NO: 12537 - DNA, 20 bp, synthetic construct
  source 1..20: mol_type = other DNA
ccaattgctcacgtagaaga

SEQ ID NO: 12538 - DNA, 20 bp, synthetic construct
  source 1..20: mol_type = other DNA
gtcagtttccagaatacaga

SEQ ID NO: 12539 - DNA, 20 bp, synthetic construct
  source 1..20: mol_type = other DNA
aaaaggttgcccaggaactt

SEQ ID NO: 12540 - DNA, 20 bp, synthetic construct
  source 1..20: mol_type = other DNA
gttggagactcaagcacctc

SEQ ID NO: 12541 - DNA, 20 bp, synthetic construct
  source 1..20: mol_type = other DNA
cgcacaacagtattgtgacc

SEQ ID NO: 12542 - DNA, 20 bp, synthetic construct
  source 1..20: mol_type = other DNA
gtctgactctaaaagagacc

SEQ ID NO: 12543 - DNA, 20 bp, synthetic construct
  source 1..20: mol_type = other DNA
caatatttcatctgaagggc

SEQ ID NO: 12544 - DNA, 20 bp, synthetic construct
  source 1..20: mol_type = other DNA
cctctcttgttggatgagtt

SEQ ID NO: 12545 - DNA, 20 bp, synthetic construct
  source 1..20: mol_type = other DNA
atcgaggttgagggtcagga

SEQ ID NO: 12546 - DNA, 20 bp, synthetic construct
  source 1..20: mol_type = other DNA
acgttacgcgctgccacgtc

SEQ ID NO: 12547 - DNA, 20 bp, synthetic construct
  source 1..20: mol_type = other DNA
cggtgggtacatgagctcca

SEQ ID NO: 12548 - DNA, 20 bp, synthetic construct
  source 1..20: mol_type = other DNA
tttgtaagaattgggcccat

SEQ ID NO: 12549 - DNA, 20 bp, synthetic construct
  source 1..20: mol_type = other DNA
gccgccatttcgagttaggg

SEQ ID NO: 12550 - DNA, 20 bp, synthetic construct
  source 1..20: mol_type = other DNA
attgggcccactcccaccct

SEQ ID NO: 12551 - DNA, 20 bp, synthetic construct
  source 1..20: mol_type = other DNA
tcaagtgaggcaatcctgga

SEQ ID NO: 12552 - DNA, 20 bp, synthetic construct
  source 1..20: mol_type = other DNA
ggttaaggaatcaaagtcag

SEQ ID NO: 12553 - DNA, 20 bp, synthetic construct
  source 1..20: mol_type = other DNA
tgaggatcccaaagaccacc

SEQ ID NO: 12554 - DNA, 20 bp, synthetic construct
  source 1..20: mol_type = other DNA
atgtccacaccgccgatgag

SEQ ID NO: 12555 - DNA, 20 bp, synthetic construct
  source 1..20: mol_type = other DNA
gtactccttcccttcttggc

SEQ ID NO: 12556 - DNA, 20 bp, synthetic construct
  source 1..20: mol_type = other DNA
atctctcggtacgtggagtt

SEQ ID NO: 12557 - DNA, 20 bp, synthetic construct
  source 1..20: mol_type = other DNA
gccctatcctatattggcac

SEQ ID NO: 12558 - DNA, 20 bp, synthetic construct
  source 1..20: mol_type = other DNA
atcctggcacgtggcggctg

SEQ ID NO: 12559 - DNA, 20 bp, synthetic construct
  source 1..20: mol_type = other DNA
taagagcatagacactcact

SEQ ID NO: 12560 - DNA, 20 bp, synthetic construct
  source 1..20: mol_type = other DNA
gcgacgactctgcaattctg

SEQ ID NO: 12561 - DNA, 20 bp, synthetic construct
  source 1..20: mol_type = other DNA
ctcatcacgcaggtgggctc

SEQ ID NO: 12562 - DNA, 20 bp, synthetic construct
  source 1..20: mol_type = other DNA
aggaagcgaggagccggcag

SEQ ID NO: 12563 - DNA, 20 bp, synthetic construct
  source 1..20: mol_type = other DNA
actatcctggccgtgctgtg

SEQ ID NO: 12564 - DNA, 20 bp, synthetic construct
  source 1..20: mol_type = other DNA
ctccttttggtgtattcgtt

SEQ ID NO: 12565 - DNA, 20 bp, synthetic construct
  source 1..20: mol_type = other DNA
gtcttgaatgaggagttact

SEQ ID NO: 12566 - DNA, 20 bp, synthetic construct
  source 1..20: mol_type = other DNA
tcaggaagccaccgcacctc

SEQ ID NO: 12567 - DNA, 20 bp, synthetic construct
  source 1..20: mol_type = other DNA
cagtgtggttgctaaagtgc

SEQ ID NO: 12568 - DNA, 20 bp, synthetic construct
  source 1..20: mol_type = other DNA
gtgcgcctaaaaccacagtg

SEQ ID NO: 12569 - DNA, 20 bp, synthetic construct
  source 1..20: mol_type = other DNA
ggaagacacctttacagatc

SEQ ID NO: 12570 - DNA, 20 bp, synthetic construct
  source 1..20: mol_type = other DNA
atccggcagcagtagatccc

SEQ ID NO: 12571 - DNA, 20 bp, synthetic construct
  source 1..20: mol_type = other DNA
aatgcacttcgtttttccct

SEQ ID NO: 12572 - DNA, 20 bp, synthetic construct
  source 1..20: mol_type = other DNA
gtccaaattcttcaagccgc

SEQ ID NO: 12573 - DNA, 20 bp, synthetic construct
  source 1..20: mol_type = other DNA
aatcctagcacagggactcc

SEQ ID NO: 12574 - DNA, 20 bp, synthetic construct
  source 1..20: mol_type = other DNA
agatcaggcagatgtttagc

SEQ ID NO: 12575 - DNA, 20 bp, synthetic construct
  source 1..20: mol_type = other DNA
aagagaacccaaaacgatgc

SEQ ID NO: 12576 - DNA, 20 bp, synthetic construct
  source 1..20: mol_type = other DNA
tcacatagccttgcctaatt

SEQ ID NO: 12577 - DNA, 20 bp, synthetic construct
  source 1..20: mol_type = other DNA
tcccgtctttgtatctcagg

SEQ ID NO: 12578 - DNA, 20 bp, synthetic construct
  source 1..20: mol_type = other DNA
gggtggctctcggagatgtt

SEQ ID NO: 12579 - DNA, 20 bp, synthetic construct
  source 1..20: mol_type = other DNA
tgtgagagcacacaactgga

SEQ ID NO: 12580 - DNA, 20 bp, synthetic construct
  source 1..20: mol_type = other DNA
agtcagagctagaatttcgg

SEQ ID NO: 12581 - DNA, 20 bp, synthetic construct
  source 1..20: mol_type = other DNA
ggatctctaggttcacactg

SEQ ID NO: 12582 - DNA, 20 bp, synthetic construct
  source 1..20: mol_type = other DNA
cctctctgagctgggtgttc

SEQ ID NO: 12583 - DNA, 20 bp, synthetic construct
  source 1..20: mol_type = other DNA
agtcaaaccttccttcttgg

SEQ ID NO: 12584 - DNA, 20 bp, synthetic construct
  source 1..20: mol_type = other DNA
gaagagctgagtttgctaaa

SEQ ID NO: 12585 - DNA, 20 bp, synthetic construct
  source 1..20: mol_type = other DNA
agtgatcgtacaggtgcatc

SEQ ID NO: 12586 - DNA, 20 bp, synthetic construct
  source 1..20: mol_type = other DNA
tgcttcagacacctgtgtaa

SEQ ID NO: 12587 - DNA, 20 bp, synthetic construct
  source 1..20: mol_type = other DNA
attttgcagacgctctcagc

SEQ ID NO: 12588 - DNA, 20 bp, synthetic construct
  source 1..20: mol_type = other DNA
ggcttcttaccaagaaattc

SEQ ID NO: 12589 - DNA, 20 bp, synthetic construct
  source 1..20: mol_type = other DNA
caactgtggtcagtttctga

SEQ ID NO: 12590 - DNA, 20 bp, synthetic construct
  source 1..20: mol_type = other DNA
aaatggtcagcagccctctc

SEQ ID NO: 12591 - DNA, 20 bp, synthetic construct
  source 1..20: mol_type = other DNA
cccatgctacatttgccgaa

SEQ ID NO: 12592 - DNA, 20 bp, synthetic construct
  source 1..20: mol_type = other DNA
taacttggactccattcact

SEQ ID NO: 12593 - DNA, 20 bp, synthetic construct
  source 1..20: mol_type = other DNA
actgaactcaggaagagtgg

SEQ ID NO: 12594 - DNA, 20 bp, synthetic construct
  source 1..20: mol_type = other DNA
tctgcatctctagccagggt

SEQ ID NO: 12595 - DNA, 20 bp, synthetic construct
  source 1..20: mol_type = other DNA
aatggcgttcccaccagaga

SEQ ID NO: 12596 - DNA, 20 bp, synthetic construct
  source 1..20: mol_type = other DNA
acctagagaagttgctaagg

SEQ ID NO: 12597 - DNA, 20 bp, synthetic construct
  source 1..20: mol_type = other DNA
gaggtcatcaagcatggagt

SEQ ID NO: 12598 - DNA, 20 bp, synthetic construct
  source 1..20: mol_type = other DNA
tgttcacgaacggcagcacg

SEQ ID NO: 12599 - DNA, 20 bp, synthetic construct
  source 1..20: mol_type = other DNA
tgtcataagtgtagcaggtc

SEQ ID NO: 12600 - DNA, 20 bp, synthetic construct
  source 1..20: mol_type = other DNA
tattgtgggctctgggaatc

SEQ ID NO: 12601 - DNA, 20 bp, synthetic construct
  source 1..20: mol_type = other DNA
atatagatccactgctggtg

SEQ ID NO: 12602 - DNA, 20 bp, synthetic construct
  source 1..20: mol_type = other DNA
ggcactattaggtagtacca

SEQ ID NO: 12603 - DNA, 20 bp, synthetic construct
  source 1..20: mol_type = other DNA
cgggaagagacaggtcagct

SEQ ID NO: 12604 - DNA, 20 bp, synthetic construct
  source 1..20: mol_type = other DNA
tatccctaaggtcccagaaa

SEQ ID NO: 12605 - DNA, 20 bp, synthetic construct
  source 1..20: mol_type = other DNA
tcaaggaggtaaagttaagc

SEQ ID NO: 12606 - DNA, 20 bp, synthetic construct
  source 1..20: mol_type = other DNA
ctaaggcagaaaatcgtctt

SEQ ID NO: 12607 - DNA, 20 bp, synthetic construct
  source 1..20: mol_type = other DNA
tgtctgtggttccatagatc

SEQ ID NO: 12608 - DNA, 20 bp, synthetic construct
  source 1..20: mol_type = other DNA
gtccgtttttgatggcactc

SEQ ID NO: 12609 - DNA, 20 bp, synthetic construct
  source 1..20: mol_type = other DNA
gttaaggcagagacatgtcc

SEQ ID NO: 12610 - DNA, 20 bp, synthetic construct
  source 1..20: mol_type = other DNA
gcccaccagtgaagacatcc

SEQ ID NO: 12611 - DNA, 20 bp, synthetic construct
  source 1..20: mol_type = other DNA
acctggtcgatggatggtga

SEQ ID NO: 12612 - DNA, 20 bp, synthetic construct
  source 1..20: mol_type = other DNA
ggagcctgatctctggtttc

SEQ ID NO: 12613 - DNA, 20 bp, synthetic construct
  source 1..20: mol_type = other DNA
gctggatcttccctccttga

SEQ ID NO: 12614 - DNA, 20 bp, synthetic construct
  source 1..20: mol_type = other DNA
acctgcagcaaaggctgcgg

SEQ ID NO: 12615 - DNA, 20 bp, synthetic construct
  source 1..20: mol_type = other DNA
tcatatcaggtcaccctggc

SEQ ID NO: 12616 - DNA, 20 bp, synthetic construct
  source 1..20: mol_type = other DNA
gaagtcacgcccgttgggca

SEQ ID NO: 12617 - DNA, 20 bp, synthetic construct
  source 1..20: mol_type = other DNA
cattgtcactgatgtcaaac

SEQ ID NO: 12618 - DNA, 20 bp, synthetic construct
  source 1..20: mol_type = other DNA
tcgtacttgatcttgccgtt

SEQ ID NO: 12619 - DNA, 20 bp, synthetic construct
  source 1..20: mol_type = other DNA
ggctgcgcttgcactctgag

SEQ ID NO: 12620 - DNA, 20 bp, synthetic construct
  source 1..20: mol_type = other DNA
aatacgaagacagccctggc

SEQ ID NO: 12621 - DNA, 20 bp, synthetic construct
  source 1..20: mol_type = other DNA
aactgggtaattccatgttc

SEQ ID NO: 12622 - DNA, 20 bp, synthetic construct
  source 1..20: mol_type = other DNA
gtttacgctgtctagccaga

SEQ ID NO: 12623 - DNA, 20 bp, synthetic construct
  source 1..20: mol_type = other DNA
aggcgtcatcgttccatttg

SEQ ID NO: 12624 - DNA, 20 bp, synthetic construct
  source 1..20: mol_type = other DNA
ccattacttcactggagtta

SEQ ID NO: 12625 - DNA, 20 bp, synthetic construct
  source 1..20: mol_type = other DNA
gatgatgaagcggcccagga

SEQ ID NO: 12626 - DNA, 20 bp, synthetic construct
  source 1..20: mol_type = other DNA
gcggtcccataacacttgtt

SEQ ID NO: 12627 - DNA, 20 bp, synthetic construct
  source 1..20: mol_type = other DNA
gtctaacatcactgtgctct

SEQ ID NO: 12628 - DNA, 20 bp, synthetic construct
  source 1..20: mol_type = other DNA
ccacgaccaacgtacgatga

SEQ ID NO: 12629 - DNA, 20 bp, synthetic construct
  source 1..20: mol_type = other DNA
tggctctgttgaatcacttc

SEQ ID NO: 12630 - DNA, 20 bp, synthetic construct
  source 1..20: mol_type = other DNA
tcccactttcagcagcatac

SEQ ID NO: 12631 - DNA, 20 bp, synthetic construct
  source 1..20: mol_type = other DNA
gagttaagtttcgagtgaag

SEQ ID NO: 12632 - DNA, 20 bp, synthetic construct
  source 1..20: mol_type = other DNA
catgtctccgcaacccggct

SEQ ID NO: 12633 - DNA, 20 bp, synthetic construct
  source 1..20: mol_type = other DNA
cctcatagctgtggtcccgg

SEQ ID NO: 12634 - DNA, 20 bp, synthetic construct
  source 1..20: mol_type = other DNA
tcaaggatagaagctgattc

SEQ ID NO: 12635 - DNA, 20 bp, synthetic construct
  source 1..20: mol_type = other DNA
ccgaggcacaggtatagctg

SEQ ID NO: 12636 - DNA, 20 bp, synthetic construct
  source 1..20: mol_type = other DNA
tttctaacatctataggccc

SEQ ID NO: 12637 - DNA, 20 bp, synthetic construct
  source 1..20: mol_type = other DNA
caaccttgcttcacattctc

SEQ ID NO: 12638 - DNA, 20 bp, synthetic construct
  source 1..20: mol_type = other DNA
cggtacatccacgtagtttt

SEQ ID NO: 12639 - DNA, 20 bp, synthetic construct
  source 1..20: mol_type = other DNA
tctctccggttttttccaat

SEQ ID NO: 12640 - DNA, 20 bp, synthetic construct
  source 1..20: mol_type = other DNA
cagaaaaagtaaagggcaga

SEQ ID NO: 12641 - DNA, 20 bp, synthetic construct
  source 1..20: mol_type = other DNA
aaagaaaggccatcatctag

SEQ ID NO: 12642 - DNA, 20 bp, synthetic construct
  source 1..20: mol_type = other DNA
tcgttttcgtggtgacaaga

SEQ ID NO: 12643 - DNA, 20 bp, synthetic construct
  source 1..20: mol_type = other DNA
tacgtaagcagagagccgga

SEQ ID NO: 12644 - DNA, 20 bp, synthetic construct
  source 1..20: mol_type = other DNA
ttcacacatgctgcatcctg

SEQ ID NO: 12645 - DNA, 20 bp, synthetic construct
  source 1..20: mol_type = other DNA
tgttatgactccaggattgt

SEQ ID NO: 12646 - DNA, 20 bp, synthetic construct
  source 1..20: mol_type = other DNA
gacatacttcaggatgccaa

SEQ ID NO: 12647 - DNA, 20 bp, synthetic construct
  source 1..20: mol_type = other DNA
ggcgtattccatgacgagag

SEQ ID NO: 12648 - DNA, 20 bp, synthetic construct
  source 1..20: mol_type = other DNA
agttggtcaccaaatcagca

SEQ ID NO: 12649 - DNA, 20 bp, synthetic construct
  source 1..20: mol_type = other DNA
ctccaatctgagcagcaatc

SEQ ID NO: 12650 - DNA, 20 bp, synthetic construct
  source 1..20: mol_type = other DNA
tcgatctcatcagggtactc

SEQ ID NO: 12651 - DNA, 20 bp, synthetic construct
  source 1..20: mol_type = other DNA
gctcggtgatttagcagcaa

SEQ ID NO: 12652 - DNA, 20 bp, synthetic construct
  source 1..20: mol_type = other DNA
cacatttgtcagtctggtgg

SEQ ID NO: 12653 - DNA, 20 bp, synthetic construct
  source 1..20: mol_type = other DNA
ccaggattcactgggatcag

SEQ ID NO: 12654 - DNA, 20 bp, synthetic construct
  source 1..20: mol_type = other DNA
ggttcagtacagagatgccc

SEQ ID NO: 12655 - DNA, 20 bp, synthetic construct
  source 1..20: mol_type = other DNA
tgacgtttccatggctggtg

SEQ ID NO: 12656 - DNA, 20 bp, synthetic construct
  source 1..20: mol_type = other DNA
ggagacctgcagtagtagcc

SEQ ID NO: 12657 - DNA, 20 bp, synthetic construct
  source 1..20: mol_type = other DNA
catggaggctgcaaagtgat

SEQ ID NO: 12658 - DNA, 20 bp, synthetic construct
  source 1..20: mol_type = other DNA
ttagcaacttgggacagtga

SEQ ID NO: 12659 - DNA, 20 bp, synthetic construct
  source 1..20: mol_type = other DNA
gtcctgcctcaaccattaat

SEQ ID NO: 12660 - DNA, 20 bp, synthetic construct
  source 1..20: mol_type = other DNA
acgctgaccacgtcatacaa

SEQ ID NO: 12661 - DNA, 20 bp, synthetic construct
  source 1..20: mol_type = other DNA
ggcaagcgcagctgagctcc

SEQ ID NO: 12662 - DNA, 20 bp, synthetic construct
  source 1..20: mol_type = other DNA
gtcttctgtgtgaaggccag

SEQ ID NO: 12663 - DNA, 20 bp, synthetic construct
  source 1..20: mol_type = other DNA
aacaacctcattcctcatgt

SEQ ID NO: 12664 - DNA, 20 bp, synthetic construct
  source 1..20: mol_type = other DNA
tagaagcctttgaccaggca

SEQ ID NO: 12665 - DNA, 20 bp, synthetic construct
  source 1..20: mol_type = other DNA
ctacagcgatgaagcagcag

SEQ ID NO: 12666 - DNA, 20 bp, synthetic construct
  source 1..20: mol_type = other DNA
taagataatcatggcccact

SEQ ID NO: 12667 - DNA, 20 bp, synthetic construct
  source 1..20: mol_type = other DNA
agaaaaccttctctgcagct

SEQ ID NO: 12668 - DNA, 20 bp, synthetic construct
  source 1..20: mol_type = other DNA
aagaagatgccgtgcatgtc

SEQ ID NO: 12669 - DNA, 20 bp, synthetic construct
  source 1..20: mol_type = other DNA
aggacaacagcagatactcc

SEQ ID NO: 12670 - DNA, 20 bp, synthetic construct
  source 1..20: mol_type = other DNA
gggcacacacagctcttctc

SEQ ID NO: 12671 - DNA, 20 bp, synthetic construct
  source 1..20: mol_type = other DNA
gtaccttatccctcttctac

SEQ ID NO: 12672 - DNA, 20 bp, synthetic construct
  source 1..20: mol_type = other DNA
cagacatctcttctcaccct

SEQ ID NO: 12673 - DNA, 20 bp, synthetic construct
  source 1..20: mol_type = other DNA
aaccagcctttcttaaggta

SEQ ID NO: 12674 - DNA, 20 bp, synthetic construct
  source 1..20: mol_type = other DNA
tatagccatgcccttcacac

SEQ ID NO: 12675 - DNA, 20 bp, synthetic construct
  source 1..20: mol_type = other DNA
gggcaagatttgaattcgat

SEQ ID NO: 12676 - DNA, 20 bp, synthetic construct
  source 1..20: mol_type = other DNA
gagatgaacttcattctgtc

SEQ ID NO: 12677 - DNA, 20 bp, synthetic construct
  source 1..20: mol_type = other DNA
ccgttccctttcttcatggg

SEQ ID NO: 12678 - DNA, 20 bp, synthetic construct
  source 1..20: mol_type = other DNA
gttttaccacgtgcttctta

SEQ ID NO: 12679 - DNA, 20 bp, synthetic construct
  source 1..20: mol_type = other DNA
cgtgatcccatcggcccagg

SEQ ID NO: 12680 - DNA, 20 bp, synthetic construct
  source 1..20: mol_type = other DNA
agcacttggtggtcactcac

SEQ ID NO: 12681 - DNA, 20 bp, synthetic construct
  source 1..20: mol_type = other DNA
atgcaatagcaggacaggat

SEQ ID NO: 12682 - DNA, 20 bp, synthetic construct
  source 1..20: mol_type = other DNA
cccactcctgaaaactgaaa

SEQ ID NO: 12683 - DNA, 20 bp, synthetic construct
  source 1..20: mol_type = other DNA
agtcttttgtcccagtttgg

SEQ ID NO: 12684 - DNA, 20 bp, synthetic construct
  source 1..20: mol_type = other DNA
gcgaagagaatctctggcaa

SEQ ID NO: 12685 - DNA, 20 bp, synthetic construct
  source 1..20: mol_type = other DNA
tttccattgatgtgagaccc

SEQ ID NO: 12686 - DNA, 20 bp, synthetic construct
  source 1..20: mol_type = other DNA
attctaccatcagagcctca

SEQ ID NO: 12687 - DNA, 20 bp, synthetic construct
  source 1..20: mol_type = other DNA
cgtctcggaatttgcggcag

SEQ ID NO: 12688 - DNA, 20 bp, synthetic construct
  source 1..20: mol_type = other DNA
attgatcgccgggcgactat

SEQ ID NO: 12689 - DNA, 20 bp, synthetic construct
  source 1..20: mol_type = other DNA
ctacgctcgaagtttggtta

SEQ ID NO: 12690 - DNA, 20 bp, synthetic construct
  source 1..20: mol_type = other DNA
tactgacttggactggtacg

SEQ ID NO: 12691 - DNA, 20 bp, synthetic construct
  source 1..20: mol_type = other DNA
gctgagggaattaggaggcg

SEQ ID NO: 12692 - DNA, 20 bp, synthetic construct
  source 1..20: mol_type = other DNA
gatttgtccatgctcaccag

SEQ ID NO: 12693 - DNA, 20 bp, synthetic construct
  source 1..20: mol_type = other DNA
cgttgtcaccacttccttca

SEQ ID NO: 12694 - DNA, 20 bp, synthetic construct
  source 1..20: mol_type = other DNA
attcctaagatggaggatag

SEQ ID NO: 12695 - DNA, 20 bp, synthetic construct
  source 1..20: mol_type = other DNA
tcacttccacatggatttct

SEQ ID NO: 12696 - DNA, 20 bp, synthetic construct
  source 1..20: mol_type = other DNA
ggaggcaagttttcatcaaa

SEQ ID NO: 12697 - DNA, 20 bp, synthetic construct
  source 1..20: mol_type = other DNA
aattcaggttgacaggtggg

SEQ ID NO: 12698 - DNA, 20 bp, synthetic construct
  source 1..20: mol_type = other DNA
cacctgagggtaaagcctac

SEQ ID NO: 12699 - DNA, 20 bp, synthetic construct
  source 1..20: mol_type = other DNA
acataggcaccttctccagg

SEQ ID NO: 12700 - DNA, 20 bp, synthetic construct
  source 1..20: mol_type = other DNA
gtagctgatctttctcttct

SEQ ID NO: 12701 - DNA, 20 bp, synthetic construct
  source 1..20: mol_type = other DNA
agccgtctggttctgtactg

SEQ ID NO: 12702 - DNA, 20 bp, synthetic construct
  source 1..20: mol_type = other DNA
ggtgatgattcattttccct

SEQ ID NO: 12703 - DNA, 20 bp, synthetic construct
  source 1..20: mol_type = other DNA
tttaactgacaggtccaagt

SEQ ID NO: 12704 - DNA, 20 bp, synthetic construct
  source 1..20: mol_type = other DNA
atggctaagtgcacagtggt

SEQ ID NO: 12705 - DNA, 20 bp, synthetic construct
  source 1..20: mol_type = other DNA
caactacctggctgtctgtc

SEQ ID NO: 12706 - DNA, 20 bp, synthetic construct
  source 1..20: mol_type = other DNA
cacaaacacgctggcaggga

SEQ ID NO: 12707 - DNA, 20 bp, synthetic construct
  source 1..20: mol_type = other DNA
caagagtttgttcttcagcc

SEQ ID NO: 12708 - DNA, 20 bp, synthetic construct
  source 1..20: mol_type = other DNA
gaagatggcaccattgggct

SEQ ID NO: 12709 - DNA, 20 bp, synthetic construct
  source 1..20: mol_type = other DNA
tgacattggtcactgatacc

SEQ ID NO: 12710 - DNA, 20 bp, synthetic construct
  source 1..20: mol_type = other DNA
gacatggagattgggaaaag

SEQ ID NO: 12711 - DNA, 20 bp, synthetic construct
  source 1..20: mol_type = other DNA
cgcgcgcgctggttagtgag

SEQ ID NO: 12712 - DNA, 20 bp, synthetic construct
  source 1..20: mol_type = other DNA
cctttcaggagacttctggg

SEQ ID NO: 12713 - DNA, 20 bp, synthetic construct
  source 1..20: mol_type = other DNA
cttcatggtccaggcgtgcc

SEQ ID NO: 12714 - DNA, 20 bp, synthetic construct
  source 1..20: mol_type = other DNA
aatccaggagagtttgccag

SEQ ID NO: 12715 - DNA, 20 bp, synthetic construct
  source 1..20: mol_type = other DNA
gctgatgtcatctgttatgt

SEQ ID NO: 12716 - DNA, 20 bp, synthetic construct
  source 1..20: mol_type = other DNA
tgcaatccatcccgaaggtg

SEQ ID NO: 12717 - DNA, 20 bp, synthetic construct
  source 1..20: mol_type = other DNA
ccatgaatctctctgtgtag

SEQ ID NO: 12718 - DNA, 20 bp, synthetic construct
  source 1..20: mol_type = other DNA
gggcactgatactcaaacac

SEQ ID NO: 12719 - DNA, 20 bp, synthetic construct
  source 1..20: mol_type = other DNA
agctgccaaccatgttgata

SEQ ID NO: 12720 - DNA, 20 bp, synthetic construct
  source 1..20: mol_type = other DNA
tgatgacgatgtgcttcagc

SEQ ID NO: 12721 - DNA, 20 bp, synthetic construct
  source 1..20: mol_type = other DNA
tgtcttctacagagtggatg

SEQ ID NO: 12722 - DNA, 20 bp, synthetic construct
  source 1..20: mol_type = other DNA
cagaacttgtcggtgatgag

SEQ ID NO: 12723 - DNA, 20 bp, synthetic construct
  source 1..20: mol_type = other DNA
aattacccttccataggaca

SEQ ID NO: 12724 - DNA, 20 bp, synthetic construct
  source 1..20: mol_type = other DNA
acgtctgagatgcacacagc

SEQ ID NO: 12725 - DNA, 20 bp, synthetic construct
  source 1..20: mol_type = other DNA
ccagaactcgggagccggtt

SEQ ID NO: 12726 - DNA, 20 bp, synthetic construct
  source 1..20: mol_type = other DNA
tttttactccagggttccaa

SEQ ID NO: 12727 - DNA, 20 bp, synthetic construct
  source 1..20: mol_type = other DNA
tgggcagcagtctggagggt

SEQ ID NO: 12728 - DNA, 20 bp, synthetic construct
  source 1..20: mol_type = other DNA
ctctcatacattcctgttac

SEQ ID NO: 12729 - DNA, 20 bp, synthetic construct
  source 1..20: mol_type = other DNA
agtctgaccagctaaagtat

SEQ ID NO: 12730 - DNA, 20 bp, synthetic construct
  source 1..20: mol_type = other DNA
acatttggctccacacatag

SEQ ID NO: 12731 - DNA, 20 bp, synthetic construct
  source 1..20: mol_type = other DNA
aaataggcctgcctttcatc

SEQ ID NO: 12732 - DNA, 20 bp, synthetic construct
  source 1..20: mol_type = other DNA
ggtggactttcttctttggt

SEQ ID NO: 12733 - DNA, 20 bp, synthetic construct
  source 1..20: mol_type = other DNA
aagggtggactttcttcttt

SEQ ID NO: 12734 - DNA, 20 bp, synthetic construct
  source 1..20: mol_type = other DNA
agcacacccgggctggatcg

SEQ ID NO: 12735 - DNA, 20 bp, synthetic construct
  source 1..20: mol_type = other DNA
aatgtaggactggtccgtca

SEQ ID NO: 12736 - DNA, 20 bp, synthetic construct
  source 1..20: mol_type = other DNA
tcgacaactagagccatgtt

SEQ ID NO: 12737 - DNA, 20 bp, synthetic construct
  source 1..20: mol_type = other DNA
tcggcaaattcgtaagcagc

SEQ ID NO: 12738 - DNA, 20 bp, synthetic construct
  source 1..20: mol_type = other DNA
cccatcattcttcaggttgt

SEQ ID NO: 12739 - DNA, 20 bp, synthetic construct
  source 1..20: mol_type = other DNA
taccgttggtttcttaagtg

SEQ ID NO: 12740 - DNA, 20 bp, synthetic construct
  source 1..20: mol_type = other DNA
ccattttggcacggatgccg

SEQ ID NO: 12741 - DNA, 20 bp, synthetic construct
  source 1..20: mol_type = other DNA
catggccaccctgcaggtgc

SEQ ID NO: 12742 - DNA, 20 bp, synthetic construct
  source 1..20: mol_type = other DNA
tttaccctatgtaaggcaag

SEQ ID NO: 12743 - DNA, 20 bp, synthetic construct
  source 1..20: mol_type = other DNA
ttttgtccacaaagaggaac

SEQ ID NO: 12744 - DNA, 20 bp, synthetic construct
  source 1..20: mol_type = other DNA
gatgtcatctgtcccaacat

SEQ ID NO: 12745 - DNA, 20 bp, synthetic construct
  source 1..20: mol_type = other DNA
tgccttcaagctcattctct

SEQ ID NO: 12746 - DNA, 20 bp, synthetic construct
  source 1..20: mol_type = other DNA
gcatcagaatccacctccct

SEQ ID NO: 12747 - DNA, 20 bp, synthetic construct
  source 1..20: mol_type = other DNA
cggcagtatagaggacggag

SEQ ID NO: 12748 - DNA, 20 bp, synthetic construct
  source 1..20: mol_type = other DNA
cagttaggatcaatgcttcc

SEQ ID NO: 12749 - DNA, 20 bp, synthetic construct
  source 1..20: mol_type = other DNA
ggtagattctgaggtctgca

SEQ ID NO: 12750 - DNA, 20 bp, synthetic construct
  source 1..20: mol_type = other DNA
gtagcgatggtagcggatcc

SEQ ID NO: 12751 - DNA, 20 bp, synthetic construct
  source 1..20: mol_type = other DNA
gttctggatttcttcgaagg

SEQ ID NO: 12752 - DNA, 20 bp, synthetic construct
  source 1..20: mol_type = other DNA
gaacgctgatgctgtttctg

SEQ ID NO: 12753 - DNA, 20 bp, synthetic construct
  source 1..20: mol_type = other DNA
ccagcatcaaaagagtgact

SEQ ID NO: 12754 - DNA, 20 bp, synthetic construct
  source 1..20: mol_type = other DNA
tttgcctccgatggtttcca

SEQ ID NO: 12755 - DNA, 20 bp, synthetic construct
  source 1..20: mol_type = other DNA
ctccaatggagcaacagttt

SEQ ID NO: 12756 - DNA, 20 bp, synthetic construct
  source 1..20: mol_type = other DNA
catggcttagtttgattctg

SEQ ID NO: 12757 - DNA, 20 bp, synthetic construct
  source 1..20: mol_type = other DNA
ggtcatgcgattctgtgctg

SEQ ID NO: 12758 - DNA, 20 bp, synthetic construct
  source 1..20: mol_type = other DNA
ctccaggagaatttcagcca

SEQ ID NO: 12759 - DNA, 20 bp, synthetic construct
  source 1..20: mol_type = other DNA
tcccgaccatagattaggga

SEQ ID NO: 12760 - DNA, 20 bp, synthetic construct
  source 1..20: mol_type = other DNA
cagacccacacattgttgac

SEQ ID NO: 12761 - DNA, 20 bp, synthetic construct
  source 1..20: mol_type = other DNA
cgaacccattggctggattt

SEQ ID NO: 12762 - DNA, 20 bp, synthetic construct
  source 1..20: mol_type = other DNA
taaagccgaccgtggagtca

SEQ ID NO: 12763 - DNA, 20 bp, synthetic construct
  source 1..20: mol_type = other DNA
tccaacgatgtttaaaggca

SEQ ID NO: 12764 - DNA, 20 bp, synthetic construct
  source 1..20: mol_type = other DNA
gctgtctctgattgtgctga

SEQ ID NO: 12765 - DNA, 20 bp, synthetic construct
  source 1..20: mol_type = other DNA
tctgtgtcacaggtggagtt

SEQ ID NO: 12766 - DNA, 20 bp, synthetic construct
  source 1..20: mol_type = other DNA
tccataattatccacctgga

SEQ ID NO: 12767 - DNA, 20 bp, synthetic construct
  source 1..20: mol_type = other DNA
gcggcatttcccaatgactg

SEQ ID NO: 12768 - DNA, 20 bp, synthetic construct
  source 1..20: mol_type = other DNA
gccctgtagtgaaacacaac

SEQ ID NO: 12769 - DNA, 20 bp, synthetic construct
  source 1..20: mol_type = other DNA
attacgacagggattagagt

SEQ ID NO: 12770 - DNA, 20 bp, synthetic construct
  source 1..20: mol_type = other DNA
cacgcatctggcgttccagg

SEQ ID NO: 12771 - DNA, 20 bp, synthetic construct
  source 1..20: mol_type = other DNA
ggacaatggtgccgcccacc

SEQ ID NO: 12772 - DNA, 20 bp, synthetic construct
  source 1..20: mol_type = other DNA
gaaggtcaggtacatgaaag

SEQ ID NO: 12773 - DNA, 20 bp, synthetic construct
  source 1..20: mol_type = other DNA
gtgcgatgctttctgtgact

SEQ ID NO: 12774 - DNA, 20 bp, synthetic construct
  source 1..20: mol_type = other DNA
gtgttattcacttatgcctg

SEQ ID NO: 12775 - DNA, 20 bp, synthetic construct
  source 1..20: mol_type = other DNA
gggtgaaattggcaaagaca

SEQ ID NO: 12776 - DNA, 20 bp, synthetic construct
  source 1..20: mol_type = other DNA
cactgttgagactcttgaca

SEQ ID NO: 12777 - DNA, 20 bp, synthetic construct
  source 1..20: mol_type = other DNA
agcctcaaagcttggccagg

SEQ ID NO: 12778 - DNA, 20 bp, synthetic construct
  source 1..20: mol_type = other DNA
ctatagctcgcgagcctctg

SEQ ID NO: 12779 - DNA, 20 bp, synthetic construct
  source 1..20: mol_type = other DNA
ggcccttcaaggagcgggtg

SEQ ID NO: 12780 - DNA, 20 bp, synthetic construct
  source 1..20: mol_type = other DNA
caactgaaccaaacagatct

SEQ ID NO: 12781 - DNA, 20 bp, synthetic construct
  source 1..20: mol_type = other DNA
cggaagaacaccgagagata

SEQ ID NO: 12782 - DNA, 20 bp, synthetic construct
  source 1..20: mol_type = other DNA
gtccaacctgttagagctac

SEQ ID NO: 12783 - DNA, 20 bp, synthetic construct
  source 1..20: mol_type = other DNA
ccatgaaatgactactaggt

SEQ ID NO: 12784 - DNA, 20 bp, synthetic construct
  source 1..20: mol_type = other DNA
cgtgacctcatcttgacaca

SEQ ID NO: 12785 - DNA, 20 bp, synthetic construct
  source 1..20: mol_type = other DNA
gactgacctgctctctggct

SEQ ID NO: 12786 - DNA, 20 bp, synthetic construct
  source 1..20: mol_type = other DNA
tgtcagcatactgccgcggg

SEQ ID NO: 12787 - DNA, 20 bp, synthetic construct
  source 1..20: mol_type = other DNA
caggaaaaggcaggcgagtg

SEQ ID NO: 12788 - DNA, 20 bp, synthetic construct
  source 1..20: mol_type = other DNA
aaatggccaacagaacaacc

SEQ ID NO: 12789 - DNA, 20 bp, synthetic construct
  source 1..20: mol_type = other DNA
gtaggccttgttgggcccaa

SEQ ID NO: 12790 - DNA, 20 bp, synthetic construct
  source 1..20: mol_type = other DNA
agtcacagctgagaccttcc

SEQ ID NO: 12791 - DNA, 20 bp, synthetic construct
  source 1..20: mol_type = other DNA
ctatcactaccaaggcaatc

SEQ ID NO: 12792 - DNA, 20 bp, synthetic construct
  source 1..20: mol_type = other DNA
gttgctgggttcttaacaca

SEQ ID NO: 12793 - DNA, 20 bp, synthetic construct
  source 1..20: mol_type = other DNA
aacaactcagctgtgagagg

SEQ ID NO: 12794 - DNA, 20 bp, synthetic construct
  source 1..20: mol_type = other DNA
tgtgttgggtcttcctgcga

SEQ ID NO: 12795 - DNA, 20 bp, synthetic construct
  source 1..20: mol_type = other DNA
gtcacattgaaaagcttctc

SEQ ID NO: 12796 - DNA, 20 bp, synthetic construct
  source 1..20: mol_type = other DNA
atcaaacaagccctgctcgt

SEQ ID NO: 12797 - DNA, 20 bp, synthetic construct
  source 1..20: mol_type = other DNA
agagaagatcacaaggatgc

SEQ ID NO: 12798 - DNA, 20 bp, synthetic construct
  source 1..20: mol_type = other DNA
taaggttgaccgcattgtcg

SEQ ID NO: 12799 - DNA, 20 bp, synthetic construct
  source 1..20: mol_type = other DNA
cacaaagaccatcaagaggc

SEQ ID NO: 12800 - DNA, 20 bp, synthetic construct
  source 1..20: mol_type = other DNA
tgagttcgaagatgcagagg

SEQ ID NO: 12801 - DNA, 20 bp, synthetic construct
  source 1..20: mol_type = other DNA
ggacagaagagtttgtgttt

SEQ ID NO: 12802 - DNA, 20 bp, synthetic construct
  source 1..20: mol_type = other DNA
ctgaacctcatcatttcgcc

SEQ ID NO: 12803 - DNA, 20 bp, synthetic construct
  source 1..20: mol_type = other DNA
acgccaagacagagttgggc

SEQ ID NO: 12804 - DNA, 20 bp, synthetic construct
  source 1..20: mol_type = other DNA
cgcagttggccatagggctc

SEQ ID NO: 12805 - DNA, 20 bp, synthetic construct
  source 1..20: mol_type = other DNA
gtcaccgaactatcagcctg

SEQ ID NO: 12806 - DNA, 20 bp, synthetic construct
  source 1..20: mol_type = other DNA
gagtgcgtctctagcacttt

SEQ ID NO: 12807 - DNA, 20 bp, synthetic construct
  source 1..20: mol_type = other DNA
tactgatgatgcttcaaagg

SEQ ID NO: 12808 - DNA, 20 bp, synthetic construct
  source 1..20: mol_type = other DNA
gactcccagcgtcagctcca

SEQ ID NO: 12809 - DNA, 20 bp, synthetic construct
  source 1..20: mol_type = other DNA
ctctctggatgtctgcatca

SEQ ID NO: 12810 - DNA, 20 bp, synthetic construct
  source 1..20: mol_type = other DNA
catctgttgccaaaccactg

SEQ ID NO: 12811 - DNA, 20 bp, synthetic construct
  source 1..20: mol_type = other DNA
gcggcaggttatattcaaat

SEQ ID NO: 12812 - DNA, 20 bp, synthetic construct
  source 1..20: mol_type = other DNA
aaagcatggaatgacgacag

SEQ ID NO: 12813 - DNA, 20 bp, synthetic construct
  source 1..20: mol_type = other DNA
gtcccttagagggttccctc

SEQ ID NO: 12814 - DNA, 20 bp, synthetic construct
  source 1..20: mol_type = other DNA
tttctgccactattttcctc

SEQ ID NO: 12815 - DNA, 20 bp, synthetic construct
  source 1..20: mol_type = other DNA
ttgtccaagggtgacgaaag

SEQ ID NO: 12816 - DNA, 20 bp, synthetic construct
  source 1..20: mol_type = other DNA
tgacagatcagggaggaggg

SEQ ID NO: 12817 - DNA, 20 bp, synthetic construct
  source 1..20: mol_type = other DNA
cattttcttctccttttgcc

SEQ ID NO: 12818 - DNA, 20 bp, synthetic construct
  source 1..20: mol_type = other DNA
ttgcgtccacttctggtcta

SEQ ID NO: 12819 - DNA, 20 bp, synthetic construct
  source 1..20: mol_type = other DNA
gtatagatgagcaggtcaaa

SEQ ID NO: 12820 - DNA, 20 bp, synthetic construct
  source 1..20: mol_type = other DNA
cagatgcataagcacagcag

SEQ ID NO: 12821 - DNA, 20 bp, synthetic construct
  source 1..20: mol_type = other DNA
tcacaggcgaagtccagccc

SEQ ID NO: 12822 - DNA, 20 bp, synthetic construct
  source 1..20: mol_type = other DNA
ttaagcaaggaagtgcatgt

SEQ ID NO: 12823 - DNA, 20 bp, synthetic construct
  source 1..20: mol_type = other DNA
ccgctgttctttgtagtgat

SEQ ID NO: 12824 - DNA, 20 bp, synthetic construct
  source 1..20: mol_type = other DNA
tttctggtaagtgtctggtg

SEQ ID NO: 12825 - DNA, 20 bp, synthetic construct
  source 1..20: mol_type = other DNA
ggccgttgtgcttcacaaga

SEQ ID NO: 12826 - DNA, 20 bp, synthetic construct
  source 1..20: mol_type = other DNA
agtcattcatgatgtcccta

SEQ ID NO: 12827 - DNA, 20 bp, synthetic construct
  source 1..20: mol_type = other DNA
gttggtgctgaggatgctgc

SEQ ID NO: 12828 - DNA, 20 bp, synthetic construct
  source 1..20: mol_type = other DNA
cagacttcagtcacctggct

SEQ ID NO: 12829 - DNA, 20 bp, synthetic construct
  source 1..20: mol_type = other DNA
ctccacaaaacttccctggg

SEQ ID NO: 12830 - DNA, 20 bp, synthetic construct
  source 1..20: mol_type = other DNA
ccgtcactaacctctaactg

SEQ ID NO: 12831 - DNA, 20 bp, synthetic construct
  source 1..20: mol_type = other DNA
cctgtacaccctggccttca

SEQ ID NO: 12832 - DNA, 20 bp, synthetic construct
  source 1..20: mol_type = other DNA
gctggtaaggactgtgaggc

SEQ ID NO: 12833 - DNA, 20 bp, synthetic construct
  source 1..20: mol_type = other DNA
ggattgagtccgtttatgtt

SEQ ID NO: 12834 - DNA, 20 bp, synthetic construct
  source 1..20: mol_type = other DNA
ttacattatcccagacacct

SEQ ID NO: 12835 - DNA, 20 bp, synthetic construct
  source 1..20: mol_type = other DNA
cgccagatccaagcaccttc

SEQ ID NO: 12836 - DNA, 20 bp, synthetic construct
  source 1..20: mol_type = other DNA
ccgtggaatgtcacgttctt

SEQ ID NO: 12837 - DNA, 20 bp, synthetic construct
  source 1..20: mol_type = other DNA
cttggagttgatgtcagtca

SEQ ID NO: 12838 - DNA, 20 bp, synthetic construct
  source 1..20: mol_type = other DNA
catgtggtcaatgacgaact

SEQ ID NO: 12839 - DNA, 20 bp, synthetic construct
  source 1..20: mol_type = other DNA
ctcttgtgtccttcaagtag

SEQ ID NO: 12840 - DNA, 20 bp, synthetic construct
  source 1..20: mol_type = other DNA
aaacctcggcttcctccata

SEQ ID NO: 12841 - DNA, 20 bp, synthetic construct
  source 1..20: mol_type = other DNA
tctcactgtgacagcaggag

SEQ ID NO: 12842 - DNA, 20 bp, synthetic construct
  source 1..20: mol_type = other DNA
tgaacggtaacactgattgc

SEQ ID NO: 12843 - DNA, 20 bp, synthetic construct
  source 1..20: mol_type = other DNA
tgaggtcctcacagatctgc

SEQ ID NO: 12844 - DNA, 20 bp, synthetic construct
  source 1..20: mol_type = other DNA
agatcttgttctctcaccag

SEQ ID NO: 12845 - DNA, 20 bp, synthetic construct
  source 1..20: mol_type = other DNA
gcatcctcataacctttctc

SEQ ID NO: 12846 - DNA, 20 bp, synthetic construct
  source 1..20: mol_type = other DNA
ttggctacattccaggaaat

SEQ ID NO: 12847 - DNA, 20 bp, synthetic construct
  source 1..20: mol_type = other DNA
atgccagaaatctataggag

SEQ ID NO: 12848 - DNA, 20 bp, synthetic construct
  source 1..20: mol_type = other DNA
tttggtgcaggctcgtggag

SEQ ID NO: 12849 - DNA, 20 bp, synthetic construct
  source 1..20: mol_type = other DNA
ctggagggagatgaaggagg

SEQ ID NO: 12850 - DNA, 20 bp, synthetic construct
  source 1..20: mol_type = other DNA
tcttatgtggagcatcttga

SEQ ID NO: 12851 - DNA, 20 bp, synthetic construct
  source 1..20: mol_type = other DNA
ttccaggctttgtggcaaca

SEQ ID NO: 12852 - DNA, 20 bp, synthetic construct
  source 1..20: mol_type = other DNA
tgcctattctgatggttgct

SEQ ID NO: 12853 - DNA, 20 bp, synthetic construct
  source 1..20: mol_type = other DNA
aaatctcaacattccaaggg

SEQ ID NO: 12854 - DNA, 20 bp, synthetic construct
  source 1..20: mol_type = other DNA
tgatttccaggttggctttg

SEQ ID NO: 12855 - DNA, 20 bp, synthetic construct
  source 1..20: mol_type = other DNA
gaagccacgtgacattgacc

SEQ ID NO: 12856 - DNA, 20 bp, synthetic construct
  source 1..20: mol_type = other DNA
gaaagacgctgctttggcct

SEQ ID NO: 12857 - DNA, 20 bp, synthetic construct
  source 1..20: mol_type = other DNA
gggaacacatccggagcctt

SEQ ID NO: 12858 - DNA, 20 bp, synthetic construct
  source 1..20: mol_type = other DNA
gggactgaaacccgtggcct

SEQ ID NO: 12859 - DNA, 20 bp, synthetic construct
  source 1..20: mol_type = other DNA
gcatgcacacacagagcggc

SEQ ID NO: 12860 - DNA, 20 bp, synthetic construct
  source 1..20: mol_type = other DNA
ttggatctgttagcctctgg

SEQ ID NO: 12861 - DNA, 20 bp, synthetic construct
  source 1..20: mol_type = other DNA
tgacgttggtcacggtgaaa

SEQ ID NO: 12862 - DNA, 20 bp, synthetic construct
  source 1..20: mol_type = other DNA
ccaccctgatgtctcagttt

SEQ ID NO: 12863 - DNA, 20 bp, synthetic construct
  source 1..20: mol_type = other DNA
tcaccctatggaaacagctt

SEQ ID NO: 12864 - DNA, 20 bp, synthetic construct
  source 1..20: mol_type = other DNA
tcgagaacttggaattttgg

SEQ ID NO: 12865 - DNA, 20 bp, synthetic construct
  source 1..20: mol_type = other DNA
ggccttaatctccaaaggaa

SEQ ID NO: 12866 - DNA, 20 bp, synthetic construct
  source 1..20: mol_type = other DNA
ggtttggtatctgccagttt

SEQ ID NO: 12867 - DNA, 20 bp, synthetic construct
  source 1..20: mol_type = other DNA
cgaatgacagagggtttctt

SEQ ID NO: 12868 - DNA, 20 bp, synthetic construct
  source 1..20: mol_type = other DNA
acttgtttcgttgtgttccg

SEQ ID NO: 12869 - DNA, 20 bp, synthetic construct
  source 1..20: mol_type = other DNA
catcgcgccggaggatgtgg

SEQ ID NO: 12870 - DNA, 20 bp, synthetic construct
  source 1..20: mol_type = other DNA
cctgtgattaacgagggagt

SEQ ID NO: 12871 - DNA, 20 bp, synthetic construct
  source 1..20: mol_type = other DNA
ggagcagctcacaggtttgg

SEQ ID NO: 12872 - DNA, 20 bp, synthetic construct
  source 1..20: mol_type = other DNA
gcgcagaatgagatgagttg

SEQ ID NO: 12873 - DNA, 20 bp, synthetic construct
  source 1..20: mol_type = other DNA
agtagtcatccagttctgca

SEQ ID NO: 12874 - DNA, 20 bp, synthetic construct
  source 1..20: mol_type = other DNA
cctatttgagacttgactcc

SEQ ID NO: 12875 - DNA, 20 bp, synthetic construct
  source 1..20: mol_type = other DNA
tgtagactcagcccaatatc

SEQ ID NO: 12876 - DNA, 20 bp, synthetic construct
  source 1..20: mol_type = other DNA
gacaggtcaagcgggaagaa

SEQ ID NO: 12877 - DNA, 20 bp, synthetic construct
  source 1..20: mol_type = other DNA
ctgtcacgttgaactcccgg

SEQ ID NO: 12878 - DNA, 20 bp, synthetic construct
  source 1..20: mol_type = other DNA
atttggtgaattgttcgtgg

SEQ ID NO: 12879 - DNA, 20 bp, synthetic construct
  source 1..20: mol_type = other DNA
ggtccatcccgtcctgctgc

SEQ ID NO: 12880 - DNA, 20 bp, synthetic construct
  source 1..20: mol_type = other DNA
ccctcaaagcccgggtggca

SEQ ID NO: 12881 - DNA, 20 bp, synthetic construct
  source 1..20: mol_type = other DNA
tgggtagcagtaactatctg

SEQ ID NO: 12882 - DNA, 20 bp, synthetic construct
  source 1..20: mol_type = other DNA
tagggccaactcgtcatcct

SEQ ID NO: 12883 - DNA, 20 bp, synthetic construct
  source 1..20: mol_type = other DNA
ctgttattccaagggttgac

SEQ ID NO: 12884 - DNA, 20 bp, synthetic construct
  source 1..20: mol_type = other DNA
gggctgtaaaataggtgaaa

SEQ ID NO: 12885 - DNA, 20 bp, synthetic construct
  source 1..20: mol_type = other DNA
agtaaatgctggctcaatac

SEQ ID NO: 12886 - DNA, 20 bp, synthetic construct
  source 1..20: mol_type = other DNA
ttggtgctcgaataatgtca

SEQ ID NO: 12887 - DNA, 20 bp, synthetic construct
  source 1..20: mol_type = other DNA
tgtctccgcttcatgccatt

SEQ ID NO: 12888 - DNA, 20 bp, synthetic construct
  source 1..20: mol_type = other DNA
cacccatcggaatttctgtg

SEQ ID NO: 12889 - DNA, 20 bp, synthetic construct
  source 1..20: mol_type = other DNA
ctgggatcatcagaagaccc

SEQ ID NO: 12890 - DNA, 20 bp, synthetic construct
  source 1..20: mol_type = other DNA
tcctactatgtccttttcct

SEQ ID NO: 12891 - DNA, 20 bp, synthetic construct
  source 1..20: mol_type = other DNA
ctttgtgtttccagatgatg

SEQ ID NO: 12892 - DNA, 20 bp, synthetic construct
  source 1..20: mol_type = other DNA
agatccgctgctggtttggg

SEQ ID NO: 12893 - DNA, 20 bp, synthetic construct
  source 1..20: mol_type = other DNA
ccgagagggtgggtgtgtca

SEQ ID NO: 12894 - DNA, 20 bp, synthetic construct
  source 1..20: mol_type = other DNA
catactccgtctgctcaggg

SEQ ID NO: 12895 - DNA, 20 bp, synthetic construct
  source 1..20: mol_type = other DNA
gatctgttcttgtgaatgga

SEQ ID NO: 12896 - DNA, 20 bp, synthetic construct
  source 1..20: mol_type = other DNA
agtcaccaaaaggctttcgc

SEQ ID NO: 12897 - DNA, 20 bp, synthetic construct
  source 1..20: mol_type = other DNA
ccttgttgcaagtctgacat

SEQ ID NO: 12898 - DNA, 20 bp, synthetic construct
  source 1..20: mol_type = other DNA
cattcatgctgctcacagcg

SEQ ID NO: 12899 - DNA, 20 bp, synthetic construct
  source 1..20: mol_type = other DNA
gcatccgtggcagtgaacca

SEQ ID NO: 12900 - DNA, 20 bp, synthetic construct
  source 1..20: mol_type = other DNA
cggaattttaggtggccatg

SEQ ID NO: 12901 - DNA, 20 bp, synthetic construct
  source 1..20: mol_type = other DNA
tagtcagcattgtaagttgg

SEQ ID NO: 12902 - DNA, 20 bp, synthetic construct
  source 1..20: mol_type = other DNA
ctatccagtagtaagaacga

SEQ ID NO: 12903 - DNA, 20 bp, synthetic construct
  source 1..20: mol_type = other DNA
caccacacaaaacgtttcat

SEQ ID NO: 12904 - DNA, 20 bp, synthetic construct
  source 1..20: mol_type = other DNA
tcctttagcaacagccgttc

SEQ ID NO: 12905 - DNA, 20 bp, synthetic construct
  source 1..20: mol_type = other DNA
ttgactcaatgtggcaggtg

SEQ ID NO: 12906 - DNA, 20 bp, synthetic construct
  source 1..20: mol_type = other DNA
atcaatgctcgggccaacgc

SEQ ID NO: 12907 - DNA, 20 bp, synthetic construct
  source 1..20: mol_type = other DNA
gccagcatatgccttcagtt

SEQ ID NO: 12908 - DNA, 20 bp, synthetic construct
  source 1..20: mol_type = other DNA
atgaaacttcctggcgcatc

SEQ ID NO: 12909 - DNA, 20 bp, synthetic construct
  source 1..20: mol_type = other DNA
acatgccaacgaaaaggttg

SEQ ID NO: 12910 - DNA, 20 bp, synthetic construct
  source 1..20: mol_type = other DNA
tgcgtgaccatctataaaag

SEQ ID NO: 12911 - DNA, 20 bp, synthetic construct
  source 1..20: mol_type = other DNA
tctcacaagttcacggagct

SEQ ID NO: 12912 - DNA, 20 bp, synthetic construct
  source 1..20: mol_type = other DNA
tatgaaatggtcttctctgg

SEQ ID NO: 12913 - DNA, 20 bp, synthetic construct
  source 1..20: mol_type = other DNA
cctgtatcgttcacggtcag

SEQ ID NO: 12914 - DNA, 20 bp, synthetic construct
  source 1..20: mol_type = other DNA
ttccactttacctggatcta

SEQ ID NO: 12915 - DNA, 20 bp, synthetic construct
  source 1..20: mol_type = other DNA
atttacccaaaatccttccc

SEQ ID NO: 12916 - DNA, 20 bp, synthetic construct
  source 1..20: mol_type = other DNA
ggtcttattcatctgacagg

SEQ ID NO: 12917 - DNA, 20 bp, synthetic construct
  source 1..20: mol_type = other DNA
gagcagctagaatgttgaga

SEQ ID NO: 12918 - DNA, 20 bp, synthetic construct
  source 1..20: mol_type = other DNA
agacagccgctatgcacacc

SEQ ID NO: 12919 - DNA, 20 bp, synthetic construct
  source 1..20: mol_type = other DNA
gatcctgcaatgatcttgtc

SEQ ID NO: 12920 - DNA, 20 bp, synthetic construct
  source 1..20: mol_type = other DNA
ctgatcgttaaatgtcccaa

SEQ ID NO: 12921 - DNA, 20 bp, synthetic construct
  source 1..20: mol_type = other DNA
aaaacatgtctgagccaagg

SEQ ID NO: 12922 - DNA, 20 bp, synthetic construct
  source 1..20: mol_type = other DNA
cttcatgagatgatctcctt

SEQ ID NO: 12923 - DNA, 20 bp, synthetic construct
  source 1..20: mol_type = other DNA
ccatgccagtactatacaga

SEQ ID NO: 12924 - DNA, 20 bp, synthetic construct
  source 1..20: mol_type = other DNA
ctctgagcaaggcccacagg

SEQ ID NO: 12925 - DNA, 20 bp, synthetic construct
  source 1..20: mol_type = other DNA
accgatcagggagagagaga

SEQ ID NO: 12926 - DNA, 20 bp, synthetic construct
  source 1..20: mol_type = other DNA
aaccagtccatagaagaggt

SEQ ID NO: 12927 - DNA, 20 bp, synthetic construct
  source 1..20: mol_type = other DNA
ctcatggagaagcatccggg

SEQ ID NO: 12928 - DNA, 20 bp, synthetic construct
  source 1..20: mol_type = other DNA
ggaatgagagaagcaggtgg

SEQ ID NO: 12929 - DNA, 20 bp, synthetic construct
  source 1..20: mol_type = other DNA
tgactagtggtggcaggact

SEQ ID NO: 12930 - DNA, 20 bp, synthetic construct
  source 1..20: mol_type = other DNA
atccttccacgcatgacacc

SEQ ID NO: 12931 - DNA, 20 bp, synthetic construct
  source 1..20: mol_type = other DNA
ttgctttgctgtgagggaac

SEQ ID NO: 12932 - DNA, 20 bp, synthetic construct
  source 1..20: mol_type = other DNA
ctctatgcagcagccaatgt

SEQ ID NO: 12933 - DNA, 20 bp, synthetic construct
  source 1..20: mol_type = other DNA
caaaacctcctggaatccca

SEQ ID NO: 12934 - DNA, 20 bp, synthetic construct
  source 1..20: mol_type = other DNA
ccaagaggttcctccacact

SEQ ID NO: 12935 - DNA, 20 bp, synthetic construct
  source 1..20: mol_type = other DNA
gtgtgagcaccttgtggtcc

SEQ ID NO: 12936 - DNA, 20 bp, synthetic construct
  source 1..20: mol_type = other DNA
gggatgatggtctgcttcag

SEQ ID NO: 12937 - DNA, 20 bp, synthetic construct
  source 1..20: mol_type = other DNA
cgcagagaggaatctaaagt

SEQ ID NO: 12938 - DNA, 20 bp, synthetic construct
  source 1..20: mol_type = other DNA
gggactcaagcaagtacaaa

SEQ ID NO: 12939 - DNA, 20 bp, synthetic construct
  source 1..20: mol_type = other DNA
gcactagtagcctcatccag

SEQ ID NO: 12940 - DNA, 20 bp, synthetic construct
  source 1..20: mol_type = other DNA
cacacgaccagaatagtgag

SEQ ID NO: 12941 - DNA, 20 bp, synthetic construct
  source 1..20: mol_type = other DNA
gcatttgtagaggaagttct

SEQ ID NO: 12942 - DNA, 20 bp, synthetic construct
  source 1..20: mol_type = other DNA
caggtaattgtcacggagac

SEQ ID NO: 12943 - DNA, 20 bp, synthetic construct
  source 1..20: mol_type = other DNA
gtgtgaacaaggtctggacg

SEQ ID NO: 12944 - DNA, 20 bp, synthetic construct
  source 1..20: mol_type = other DNA
attgggtccatcattttgtg

SEQ ID NO: 12945 - DNA, 20 bp, synthetic construct
  source 1..20: mol_type = other DNA
gcgtacagttctagagagag

SEQ ID NO: 12946 - DNA, 20 bp, synthetic construct
  source 1..20: mol_type = other DNA
tgttctggctctatactctc

SEQ ID NO: 12947 - DNA, 20 bp, synthetic construct
  source 1..20: mol_type = other DNA
ctcatctggtgagcctgaga

SEQ ID NO: 12948 - DNA, 20 bp, synthetic construct
  source 1..20: mol_type = other DNA
gtccacacacacaattgact

SEQ ID NO: 12949 - DNA, 20 bp, synthetic construct
  source 1..20: mol_type = other DNA
tccaccggacagcactctaa

SEQ ID NO: 12950 - DNA, 20 bp, synthetic construct
  source 1..20: mol_type = other DNA
atgaaattcaactggtgggt

SEQ ID NO: 12951 - DNA, 20 bp, synthetic construct
  source 1..20: mol_type = other DNA
tgttcaggtagcggtcaaag

SEQ ID NO: 12952 - DNA, 20 bp, synthetic construct
  source 1..20: mol_type = other DNA
gccactttgcagaggccaga

SEQ ID NO: 12953 - DNA, 20 bp, synthetic construct
  source 1..20: mol_type = other DNA
agtcctaccacgagacatac

SEQ ID NO: 12954 - DNA, 20 bp, synthetic construct
  source 1..20: mol_type = other DNA
ttccttcatggagtcatagt

SEQ ID NO: 12955 - DNA, 20 bp, synthetic construct
  source 1..20: mol_type = other DNA
atcacagttttgcagaggaa

SEQ ID NO: 12956 - DNA, 20 bp, synthetic construct
  source 1..20: mol_type = other DNA
cgttatagttgtccaatctg

SEQ ID NO: 12957 - DNA, 20 bp, synthetic construct
  source 1..20: mol_type = other DNA
gttgttggcaaggcattggt

SEQ ID NO: 12958 - DNA, 20 bp, synthetic construct
  source 1..20: mol_type = other DNA
tcactgctgctctgatctac

SEQ ID NO: 12959 - DNA, 20 bp, synthetic construct
  source 1..20: mol_type = other DNA
ccaaagctgtatttgccctc

SEQ ID NO: 12960 - DNA, 20 bp, synthetic construct
  source 1..20: mol_type = other DNA
tattcgagggcttatcggtg

SEQ ID NO: 12961 - DNA, 20 bp, synthetic construct
  source 1..20: mol_type = other DNA
actcctttcccgttcatgca

SEQ ID NO: 12962 - DNA, 20 bp, synthetic construct
  source 1..20: mol_type = other DNA
cactcgtgcagttctacgat

SEQ ID NO: 12963 - DNA, 20 bp, synthetic construct
  source 1..20: mol_type = other DNA
gtaagcgatagtggttggct

SEQ ID NO: 12964 - DNA, 20 bp, synthetic construct
  source 1..20: mol_type = other DNA
ggactatctatgagcaccta

SEQ ID NO: 12965 - DNA, 20 bp, synthetic construct
  source 1..20: mol_type = other DNA
cgtcaatcccttttatatcc

SEQ ID NO: 12966 - DNA, 20 bp, synthetic construct
  source 1..20: mol_type = other DNA
tgttcaaccctggccgtctc

SEQ ID NO: 12967 - DNA, 20 bp, synthetic construct
  source 1..20: mol_type = other DNA
tcactcaatcgcgcggcatg

SEQ ID NO: 12968 - DNA, 20 bp, synthetic construct
  source 1..20: mol_type = other DNA
acctccgctttgctactaca

SEQ ID NO: 12969 - DNA, 20 bp, synthetic construct
  source 1..20: mol_type = other DNA
cggatagtgtttgaccgcgt

SEQ ID NO: 12970 - DNA, 20 bp, synthetic construct
  source 1..20: mol_type = other DNA
cattgacctttgaggaccat

SEQ ID NO: 12971 - DNA, 20 bp, synthetic construct
  source 1..20: mol_type = other DNA
tcgtgggccacattttctaa

SEQ ID NO: 12972 - DNA, 20 bp, synthetic construct
  source 1..20: mol_type = other DNA
attcaggttgacaggtggga

SEQ ID NO: 12973 - DNA, 20 bp, synthetic construct
  source 1..20: mol_type = other DNA
aaagtagtacagcccaggaa

SEQ ID NO: 12974 - DNA, 20 bp, synthetic construct
  source 1..20: mol_type = other DNA
tgatcataggtgaagagcat

SEQ ID NO: 12975 - DNA, 20 bp, synthetic construct
  source 1..20: mol_type = other DNA
aagttcaagtctcgtggtct

SEQ ID NO: 12976 - DNA, 20 bp, synthetic construct
  source 1..20: mol_type = other DNA
tattcgagcggcgcgtccct

SEQ ID NO: 12977 - DNA, 20 bp, synthetic construct
  source 1..20: mol_type = other DNA
tcaagcagcacggtgttgga

SEQ ID NO: 12978 - DNA, 20 bp, synthetic construct
  source 1..20: mol_type = other DNA
tcgtgcacagagcgtagctc

SEQ ID NO: 12979 - DNA, 20 bp, synthetic construct
  source 1..20: mol_type = other DNA
attacggtagaatcccaggc

SEQ ID NO: 12980 - DNA, 20 bp, synthetic construct
  source 1..20: mol_type = other DNA
ggaatcagcctcgtggtcca

SEQ ID NO: 12981 - DNA, 20 bp, synthetic construct
  source 1..20: mol_type = other DNA
tcgctgctccatcttgtgct

SEQ ID NO: 12982 - DNA, 20 bp, synthetic construct
  source 1..20: mol_type = other DNA
ccctctcggactttcttccg

SEQ ID NO: 12983 - DNA, 20 bp, synthetic construct
  source 1..20: mol_type = other DNA
gcattagaatacctccaaac

SEQ ID NO: 12984 - DNA, 20 bp, synthetic construct
  source 1..20: mol_type = other DNA
tgggaaaagcatgatcagtg

SEQ ID NO: 12985 - DNA, 20 bp, synthetic construct
  source 1..20: mol_type = other DNA
tcatcaccgtcttcttggta

SEQ ID NO: 12986 - DNA, 20 bp, synthetic construct
  source 1..20: mol_type = other DNA
ccttaggcaacatcctcctg

SEQ ID NO: 12987 - DNA, 20 bp, synthetic construct
  source 1..20: mol_type = other DNA
caggatttttgtcaagctgc

SEQ ID NO: 12988 - DNA, 20 bp, synthetic construct
  source 1..20: mol_type = other DNA
ggcttctaggtgccagtgac

SEQ ID NO: 12989 - DNA, 20 bp, synthetic construct
  source 1..20: mol_type = other DNA
gctcaaggacgtctgtgaag

SEQ ID NO: 12990 - DNA, 20 bp, synthetic construct
  source 1..20: mol_type = other DNA
aaggctggattaacacgctg

SEQ ID NO: 12991 - DNA, 20 bp, synthetic construct
  source 1..20: mol_type = other DNA
aggattctccaagccggcag

SEQ ID NO: 12992 - DNA, 20 bp, synthetic construct
  source 1..20: mol_type = other DNA
gcgttgcgctggcacactgg

SEQ ID NO: 12993 - DNA, 20 bp, synthetic construct
  source 1..20: mol_type = other DNA
ttgataattgacctgtacgc

SEQ ID NO: 12994 - DNA, 20 bp, synthetic construct
  source 1..20: mol_type = other DNA
catcctgctttcttgaaaag

SEQ ID NO: 12995 - DNA, 20 bp, synthetic construct
  source 1..20: mol_type = other DNA
agcagtgacatgaaggtagc

SEQ ID NO: 12996 - DNA, 20 bp, synthetic construct
  source 1..20: mol_type = other DNA
ataggacagctcaaggacag

SEQ ID NO: 12997 - DNA, 20 bp, synthetic construct
  source 1..20: mol_type = other DNA
gctccaaggtcaggaagtcc

SEQ ID NO: 12998 - DNA, 20 bp, synthetic construct
  source 1..20: mol_type = other DNA
gggtcatacacacagacatg

SEQ ID NO: 12999 - DNA, 20 bp, synthetic construct
  source 1..20: mol_type = other DNA
agtgcacgcagcaacacagg

SEQ ID NO: 13000 - DNA, 20 bp, synthetic construct
  source 1..20: mol_type = other DNA
atcttctgcttcggaggcaa

SEQ ID NO: 13001 - DNA, 20 bp, synthetic construct
  source 1..20: mol_type = other DNA
aatgtcaacatgcccaactg

SEQ ID NO: 13002 - DNA, 20 bp, synthetic construct
  source 1..20: mol_type = other DNA
atttcacaaataccgcaggt

SEQ ID NO: 13003 - DNA, 20 bp, synthetic construct
  source 1..20: mol_type = other DNA
ccaccaatatatgctgtgaa

SEQ ID NO: 13004 - DNA, 20 bp, synthetic construct
  source 1..20: mol_type = other DNA
gggcagttacattctggtgc

SEQ ID NO: 13005 - DNA, 20 bp, synthetic construct
  source 1..20: mol_type = other DNA
gagagtcatgaggactgtgg

SEQ ID NO: 13006 - DNA, 20 bp, synthetic construct
  source 1..20: mol_type = other DNA
gtaaaagggaaggccttcac

SEQ ID NO: 13007 - DNA, 20 bp, synthetic construct
  source 1..20: mol_type = other DNA
gaagaaattgcttgcttcca

SEQ ID NO: 13008 - DNA, 20 bp, synthetic construct
  source 1..20: mol_type = other DNA
gcaccagccacactgaacaa

SEQ ID NO: 13009 - DNA, 20 bp, synthetic construct
  source 1..20: mol_type = other DNA
ggtttgtgggccgatgggct

SEQ ID NO: 13010 - DNA, 20 bp, synthetic construct
  source 1..20: mol_type = other DNA
tccaggaaagtcatgtgcta

SEQ ID NO: 13011 - DNA, 20 bp, synthetic construct
  source 1..20: mol_type = other DNA
tgggctgctattgaaaccac

SEQ ID NO: 13012 - DNA, 20 bp, synthetic construct
  source 1..20: mol_type = other DNA
ctgagagactctttctccat

SEQ ID NO: 13013 - DNA, 20 bp, synthetic construct
  source 1..20: mol_type = other DNA
ccgattcggagtacagttcc

SEQ ID NO: 13014 - DNA, 20 bp, synthetic construct
  source 1..20: mol_type = other DNA
gcccatttttccctctgccc

SEQ ID NO: 13015 - DNA, 20 bp, synthetic construct
  source 1..20: mol_type = other DNA
ttaagtcactaatcctctcc

SEQ ID NO: 13016 - DNA, 20 bp, synthetic construct
  source 1..20: mol_type = other DNA
attgatgtggacatctctga

SEQ ID NO: 13017 - DNA, 20 bp, synthetic construct
  source 1..20: mol_type = other DNA
gggtactgccagctcacttc

SEQ ID NO: 13018 - DNA, 20 bp, synthetic construct
  source 1..20: mol_type = other DNA
cccgtgtctagcccagtgag

SEQ ID NO: 13019 - DNA, 20 bp, synthetic construct
  source 1..20: mol_type = other DNA
cttgcttcatctggacaaat

SEQ ID NO: 13020 - DNA, 20 bp, synthetic construct
  source 1..20: mol_type = other DNA
tcaactgttgcccgcattgc

SEQ ID NO: 13021 - DNA, 20 bp, synthetic construct
  source 1..20: mol_type = other DNA
atagatccggacttcaggaa

SEQ ID NO: 13022 - DNA, 20 bp, synthetic construct
  source 1..20: mol_type = other DNA
atggtgctagtcctatccca

SEQ ID NO: 13023 - DNA, 20 bp, synthetic construct
  source 1..20: mol_type = other DNA
cgccggagaaacccgagctc

SEQ ID NO: 13024 - DNA, 20 bp, synthetic construct
  source 1..20: mol_type = other DNA
cattgcacacagaggccacc

SEQ ID NO: 13025 - DNA, 20 bp, synthetic construct
  source 1..20: mol_type = other DNA
atcaaaaagagcgagtggga

SEQ ID NO: 13026 - DNA, 20 bp, synthetic construct
  source 1..20: mol_type = other DNA
taccagttcttacaagtgct

SEQ ID NO: 13027 - DNA, 20 bp, synthetic construct
  source 1..20: mol_type = other DNA
actttaagaggtttgccagg

SEQ ID NO: 13028 - DNA, 20 bp, synthetic construct
  source 1..20: mol_type = other DNA
ggaacgtggagaggaggagg

SEQ ID NO: 13029 - DNA, 20 bp, synthetic construct
  source 1..20: mol_type = other DNA
ctagggagaacagtttcaat

SEQ ID NO: 13030 - DNA, 20 bp, synthetic construct
  source 1..20: mol_type = other DNA
gctctgggatttctttgctg

SEQ ID NO: 13031 - DNA, 20 bp, synthetic construct
  source 1..20: mol_type = other DNA
gataagcagccagaagccag

SEQ ID NO: 13032 - DNA, 20 bp, synthetic construct
  source 1..20: mol_type = other DNA
aataccggacacaggttccc

SEQ ID NO: 13033 - DNA, 20 bp, synthetic construct
  source 1..20: mol_type = other DNA
gagacaacacacaaactaag

SEQ ID NO: 13034 - DNA, 20 bp, synthetic construct
  source 1..20: mol_type = other DNA
taccaagggaatgttggact

SEQ ID NO: 13035 - DNA, 20 bp, synthetic construct
  source 1..20: mol_type = other DNA
tacaggttgtgttccatggg

SEQ ID NO: 13036 - DNA, 20 bp, synthetic construct
  source 1..20: mol_type = other DNA
tatcagtctagttctgtcct

SEQ ID NO: 13037 - DNA, 20 bp, synthetic construct
  source 1..20: mol_type = other DNA
cgtggctgatctcaccaatg

SEQ ID NO: 13038 - DNA, 20 bp, synthetic construct
  source 1..20: mol_type = other DNA
tatcacactgtaagtggtcc

SEQ ID NO: 13039 - DNA, 20 bp, synthetic construct
  source 1..20: mol_type = other DNA
tggtcgccatcttgtaaaca

SEQ ID NO: 13040 - DNA, 20 bp, synthetic construct
  source 1..20: mol_type = other DNA
aactagtgtgagttctggga

SEQ ID NO: 13041 - DNA, 20 bp, synthetic construct
  source 1..20: mol_type = other DNA
cacgacacaatcctctgtct

SEQ ID NO: 13042 - DNA, 20 bp, synthetic construct
  source 1..20: mol_type = other DNA
agatctgaggcctttaagaa

SEQ ID NO: 13043 - DNA, 20 bp, synthetic construct
  source 1..20: mol_type = other DNA
tccatcttcataggcagcaa

SEQ ID NO: 13044 - DNA, 20 bp, synthetic construct
  source 1..20: mol_type = other DNA
gggagaacggaatccataag

SEQ ID NO: 13045 - DNA, 20 bp, synthetic construct
  source 1..20: mol_type = other DNA
caggtcttggtattcacgaa

SEQ ID NO: 13046 - DNA, 20 bp, synthetic construct
  source 1..20: mol_type = other DNA
tggttagctggtccacctgc

SEQ ID NO: 13047 - DNA, 20 bp, synthetic construct
  source 1..20: mol_type = other DNA
cacgttaaatacatcctgga

SEQ ID NO: 13048 - DNA, 20 bp, synthetic construct
  source 1..20: mol_type = other DNA
ccaggacccatatttcttgg

SEQ ID NO: 13049 - DNA, 20 bp, synthetic construct
  source 1..20: mol_type = other DNA
tctatgctgatacaagccag

SEQ ID NO: 13050 - DNA, 20 bp, synthetic construct
  source 1..20: mol_type = other DNA
tgtagttgaaggttgccttt

SEQ ID NO: 13051 - DNA, 20 bp, synthetic construct
  source 1..20: mol_type = other DNA
ctagcctttctctactgaac

SEQ ID NO: 13052 - DNA, 20 bp, synthetic construct
  source 1..20: mol_type = other DNA
caaagcccaagagttcttgg

SEQ ID NO: 13053 - DNA, 20 bp, synthetic construct
  source 1..20: mol_type = other DNA
ggtttatgaggcttgtccct

SEQ ID NO: 13054 - DNA, 20 bp, synthetic construct
  source 1..20: mol_type = other DNA
gcccttcaaggagcgggtgg

SEQ ID NO: 13055 - DNA, 20 bp, synthetic construct
  source 1..20: mol_type = other DNA
gatgtggacagcatgttgtg

SEQ ID NO: 13056 - DNA, 20 bp, synthetic construct
  source 1..20: mol_type = other DNA
acataggctaatgtgcccac

SEQ ID NO: 13057 - DNA, 20 bp, synthetic construct
  source 1..20: mol_type = other DNA
ctgagcttgctcgctcggga

SEQ ID NO: 13058 - DNA, 20 bp, synthetic construct
  source 1..20: mol_type = other DNA
tttggaagaagactaagagg

SEQ ID NO: 13059 - DNA, 20 bp, synthetic construct
  source 1..20: mol_type = other DNA
agttgcgtgcctggagcagg

SEQ ID NO: 13060 - DNA, 20 bp, synthetic construct
  source 1..20: mol_type = other DNA
gctctagttctggtctgagc

SEQ ID NO: 13061 - DNA, 20 bp, synthetic construct
  source 1..20: mol_type = other DNA
agcggaaatcttcatcgtcc

SEQ ID NO: 13062 - DNA, 20 bp, synthetic construct
  source 1..20: mol_type = other DNA
ttacggtggcgcgcagcgag

SEQ ID NO: 13063 - DNA, 20 bp, synthetic construct
  source 1..20: mol_type = other DNA
agccagatgtgtccaaatcc

SEQ ID NO: 13064 - DNA, 20 bp, synthetic construct
  source 1..20: mol_type = other DNA
cccaagctccattgtaaaaa

SEQ ID NO: 13065 - DNA, 20 bp, synthetic construct
  source 1..20: mol_type = other DNA
ggctcatgagcttcccggaa

SEQ ID NO: 13066 - DNA, 20 bp, synthetic construct
  source 1..20: mol_type = other DNA
ccaaagaggtagaaacgaaa

SEQ ID NO: 13067 - DNA, 20 bp, synthetic construct
  source 1..20: mol_type = other DNA
taggcctccgccatcttatc

SEQ ID NO: 13068 - DNA, 20 bp, synthetic construct
  source 1..20: mol_type = other DNA
tgtctcataatctgggcgtc

SEQ ID NO: 13069 - DNA, 20 bp, synthetic construct
  source 1..20: mol_type = other DNA
tgctcagccacaattcttgc

SEQ ID NO: 13070 - DNA, 20 bp, synthetic construct
  source 1..20: mol_type = other DNA
tgaatggcttggaggatgaa

SEQ ID NO: 13071 - DNA, 20 bp, synthetic construct
  source 1..20: mol_type = other DNA
gtccttcacgaggaatgttc

SEQ ID NO: 13072 - DNA, 20 bp, synthetic construct
  source 1..20: mol_type = other DNA
taaggaggaggatacataac

SEQ ID NO: 13073 - DNA, 20 bp, synthetic construct
  source 1..20: mol_type = other DNA
aaatagcacccacactgaaa

SEQ ID NO: 13074 - DNA, 20 bp, synthetic construct
  source 1..20: mol_type = other DNA
gggcaagtgtccaccagggc

SEQ ID NO: 13075 - DNA, 20 bp, synthetic construct
  source 1..20: mol_type = other DNA
agacaataagctcagttctg

SEQ ID NO: 13076 - DNA, 20 bp, synthetic construct
  source 1..20: mol_type = other DNA
ggacttcttatacctacttc

SEQ ID NO: 13077 - DNA, 20 bp, synthetic construct
  source 1..20: mol_type = other DNA
tgatgtatagggtttagtgg

SEQ ID NO: 13078 - DNA, 20 bp, synthetic construct
  source 1..20: mol_type = other DNA
agcctagaaaagctcatctt

SEQ ID NO: 13079 - DNA, 20 bp, synthetic construct
  source 1..20: mol_type = other DNA
atcaccacttctctgggcag

SEQ ID NO: 13080 - DNA, 20 bp, synthetic construct
  source 1..20: mol_type = other DNA
accaaagtggaaaggatctt

SEQ ID NO: 13081 - DNA, 20 bp, synthetic construct
  source 1..20: mol_type = other DNA
taactgaggagccaattcaa

SEQ ID NO: 13082 - DNA, 20 bp, synthetic construct
  source 1..20: mol_type = other DNA
tgcaaatgaccatccagtgg

SEQ ID NO: 13083 - DNA, 20 bp, synthetic construct
  source 1..20: mol_type = other DNA
ttagacgttctagagcctgg

SEQ ID NO: 13084 - DNA, 20 bp, synthetic construct
  source 1..20: mol_type = other DNA
tggaacagaaggtgacttgg

SEQ ID NO: 13085 - DNA, 20 bp, synthetic construct
  source 1..20: mol_type = other DNA
atcgtttcaccttctctggt

SEQ ID NO: 13086 - DNA, 20 bp, synthetic construct
  source 1..20: mol_type = other DNA
atgcctagcccaatgaaaag

SEQ ID NO: 13087 - DNA, 20 bp, synthetic construct
  source 1..20: mol_type = other DNA
aaactagagagcaacactca

SEQ ID NO: 13088 - DNA, 20 bp, synthetic construct
  source 1..20: mol_type = other DNA
gagataaggtcgcgctggtc

SEQ ID NO: 13089 - DNA, 20 bp, synthetic construct
  source 1..20: mol_type = other DNA
cgttgttgctgctattgtgc

SEQ ID NO: 13090 - DNA, 20 bp, synthetic construct
  source 1..20: mol_type = other DNA
tggatggtgatgttccctgc

SEQ ID NO: 13091 - DNA, 20 bp, synthetic construct
  source 1..20: mol_type = other DNA
ccttgcttctgcggacactg

SEQ ID NO: 13092 - DNA, 20 bp, synthetic construct
  source 1..20: mol_type = other DNA
gcttcttcttcttccatttc

SEQ ID NO: 13093 - DNA, 20 bp, synthetic construct
  source 1..20: mol_type = other DNA
tagtccctgttacagcagca

SEQ ID NO: 13094 - DNA, 20 bp, synthetic construct
  source 1..20: mol_type = other DNA
gtttgaagtaatgtagtggc

SEQ ID NO: 13095 - DNA, 20 bp, synthetic construct
  source 1..20: mol_type = other DNA
ccctttgtaaaacgggcggg

SEQ ID NO: 13096 - DNA, 20 bp, synthetic construct
  source 1..20: mol_type = other DNA
tttaatcatctgtgggcctt

SEQ ID NO: 13097 - DNA, 20 bp, synthetic construct
  source 1..20: mol_type = other DNA
ggctgagcacacgatctggg

SEQ ID NO: 13098 - DNA, 20 bp, synthetic construct
  source 1..20: mol_type = other DNA
gcccgtgcagatggaatcat

SEQ ID NO: 13099 - DNA, 20 bp, synthetic construct
  source 1..20: mol_type = other DNA
ctaaaacatagccatgtgag

SEQ ID NO: 13100 - DNA, 20 bp, synthetic construct
  source 1..20: mol_type = other DNA
aggtaaggatgctccttttc

SEQ ID NO: 13101 - DNA, 20 bp, synthetic construct
  source 1..20: mol_type = other DNA
gatgttgcatttcgtcacac

SEQ ID NO: 13102 - DNA, 20 bp, synthetic construct
  source 1..20: mol_type = other DNA
tggaaatccctggtcctgtc

SEQ ID NO: 13103 - DNA, 20 bp, synthetic construct
  source 1..20: mol_type = other DNA
tcgccattataatagcgggc

SEQ ID NO: 13104 - DNA, 20 bp, synthetic construct
  source 1..20: mol_type = other DNA
gaatccgtgggagatggagt

SEQ ID NO: 13105 - DNA, 20 bp, synthetic construct
  source 1..20: mol_type = other DNA
gcatcgctccgctaggtgtc

SEQ ID NO: 13106 - DNA, 20 bp, synthetic construct
  source 1..20: mol_type = other DNA
tccatacctagcaggctgtc

SEQ ID NO: 13107 - DNA, 20 bp, synthetic construct
  source 1..20: mol_type = other DNA
ttggttttcctttctgtgct

SEQ ID NO: 13108 - DNA, 20 bp, synthetic construct
  source 1..20: mol_type = other DNA
cgaatggcctggcactggat

SEQ ID NO: 13109 - DNA, 20 bp, synthetic construct
  source 1..20: mol_type = other DNA
gctgatggtagctgtagact

SEQ ID NO: 13110 - DNA, 20 bp, synthetic construct
  source 1..20: mol_type = other DNA
cattggtccggtcttctcct

SEQ ID NO: 13111 - DNA, 20 bp, synthetic construct
  source 1..20: mol_type = other DNA
gatatgagtcagaatggctt

SEQ ID NO: 13112 - DNA, 20 bp, synthetic construct
  source 1..20: mol_type = other DNA
ccacagtcaaggaaaccagc

SEQ ID NO: 13113 - DNA, 20 bp, synthetic construct
  source 1..20: mol_type = other DNA
ggctcagacgagagaagacc

SEQ ID NO: 13114 - DNA, 20 bp, synthetic construct
  source 1..20: mol_type = other DNA
gagttggagatgggaaagtg

SEQ ID NO: 13115 - DNA, 20 bp, synthetic construct
  source 1..20: mol_type = other DNA
ccttttgcatgttcaatcct

SEQ ID NO: 13116 - DNA, 20 bp, synthetic construct
  source 1..20: mol_type = other DNA
cccaagaatgacctgggacc

SEQ ID NO: 13117 - DNA, 20 bp, synthetic construct
  source 1..20: mol_type = other DNA
ataagataagccatgtaggg

SEQ ID NO: 13118 - DNA, 20 bp, synthetic construct
  source 1..20: mol_type = other DNA
ggcgcttcattgttctcttt

SEQ ID NO: 13119 - DNA, 20 bp, synthetic construct
  source 1..20: mol_type = other DNA
gaaggtggtaccattactgt

SEQ ID NO: 13120 - DNA, 20 bp, synthetic construct
  source 1..20: mol_type = other DNA
ggttgcttttgatccaagtc

SEQ ID NO: 13121 - DNA, 20 bp, synthetic construct
  source 1..20: mol_type = other DNA
ctgcatttgccaatcctgag

SEQ ID NO: 13122 - DNA, 20 bp, synthetic construct
  source 1..20: mol_type = other DNA
cccagttttccctagtttat

SEQ ID NO: 13123 - DNA, 20 bp, synthetic construct
  source 1..20: mol_type = other DNA
caggattcagatagaactcg

SEQ ID NO: 13124 - DNA, 20 bp, synthetic construct
  source 1..20: mol_type = other DNA
aaaggtggtcttccctgggc

SEQ ID NO: 13125 - DNA, 20 bp, synthetic construct
  source 1..20: mol_type = other DNA
caccagaccgtctgatagct

SEQ ID NO: 13126 - DNA, 20 bp, synthetic construct
  source 1..20: mol_type = other DNA
aacagcatctgactcctttt

SEQ ID NO: 13127 - DNA, 20 bp, synthetic construct
  source 1..20: mol_type = other DNA
gtgtagtcatcgctgttctc

SEQ ID NO: 13128 - DNA, 20 bp, synthetic construct
  source 1..20: mol_type = other DNA
ggaattctcacaggagacga

SEQ ID NO: 13129 - DNA, 20 bp, synthetic construct
  source 1..20: mol_type = other DNA
gtgcccagactgcctcgtgc

SEQ ID NO: 13130 - DNA, 20 bp, synthetic construct
  source 1..20: mol_type = other DNA
cttgttacttcgggaagcga

SEQ ID NO: 13131 - DNA, 20 bp, synthetic construct
  source 1..20: mol_type = other DNA
ttcacagagaagctcagtaa

SEQ ID NO: 13132 - DNA, 20 bp, synthetic construct
  source 1..20: mol_type = other DNA
tagatgcctttctcttggag

SEQ ID NO: 13133 - DNA, 20 bp, synthetic construct
  source 1..20: mol_type = other DNA
tgttcaggttgaccatcaca

SEQ ID NO: 13134 - DNA, 20 bp, synthetic construct
  source 1..20: mol_type = other DNA
agtatgaaaaccttagtcgg

SEQ ID NO: 13135 - DNA, 20 bp, synthetic construct
  source 1..20: mol_type = other DNA
actaccctaaggcaggcagt

SEQ ID NO: 13136 - DNA, 20 bp, synthetic construct
  source 1..20: mol_type = other DNA
catgacggctacgttcatgt

SEQ ID NO: 13137 - DNA, 20 bp, synthetic construct
  source 1..20: mol_type = other DNA
gttccttccttgtaggccat

SEQ ID NO: 13138 - DNA, 20 bp, synthetic construct
  source 1..20: mol_type = other DNA
acccaagactcagacaacct

SEQ ID NO: 13139 - DNA, 20 bp, synthetic construct
  source 1..20: mol_type = other DNA
ctcaacgcttgtggagcctt

SEQ ID NO: 13140 - DNA, 20 bp, synthetic construct
  source 1..20: mol_type = other DNA
tcttattgggtcaagctggt

SEQ ID NO: 13141 - DNA, 20 bp, synthetic construct
  source 1..20: mol_type = other DNA
ctgggtcctcaaaagcacag

SEQ ID NO: 13142 - DNA, 20 bp, synthetic construct
  source 1..20: mol_type = other DNA
tactagtgacgtttggcact

SEQ ID NO: 13143 - DNA, 20 bp, synthetic construct
  source 1..20: mol_type = other DNA
gctggacttcgactttcttt

SEQ ID NO: 13144 - DNA, 20 bp, synthetic construct
  source 1..20: mol_type = other DNA
atatagaaagactccaccag

SEQ ID NO: 13145 - DNA, 20 bp, synthetic construct
  source 1..20: mol_type = other DNA
catcagtggcaaacaccagc

SEQ ID NO: 13146 - DNA, 20 bp, synthetic construct
  source 1..20: mol_type = other DNA
ggcccttttcgaacttcagg

SEQ ID NO: 13147 - DNA, 20 bp, synthetic construct
  source 1..20: mol_type = other DNA
acctctttcaggtgagcatg

SEQ ID NO: 13148 - DNA, 20 bp, synthetic construct
  source 1..20: mol_type = other DNA
ttggacacagacacaacagg

SEQ ID NO: 13149 - DNA, 20 bp, synthetic construct
  source 1..20: mol_type = other DNA
tgactcggatagccctccca

SEQ ID NO: 13150 - DNA, 20 bp, synthetic construct
  source 1..20: mol_type = other DNA
caaagcgttcttgtccagat

SEQ ID NO: 13151 - DNA, 20 bp, synthetic construct
  source 1..20: mol_type = other DNA
tgtgtgggttgaatgtcaac

SEQ ID NO: 13152 - DNA, 20 bp, synthetic construct
  source 1..20: mol_type = other DNA
gtatcatccatccattttcc

SEQ ID NO: 13153 - DNA, 20 bp, synthetic construct
  source 1..20: mol_type = other DNA
tccagtagccatcaagatcc

SEQ ID NO: 13154 - DNA, 20 bp, synthetic construct
  source 1..20: mol_type = other DNA
gctattacaagttcctggaa

SEQ ID NO: 13155 - DNA, 20 bp, synthetic construct
  source 1..20: mol_type = other DNA
tggtggcattttctatggtc

SEQ ID NO: 13156 - DNA, 20 bp, synthetic construct
  source 1..20: mol_type = other DNA
caccagggtgacggactggc

SEQ ID NO: 13157 - DNA, 20 bp, synthetic construct
  source 1..20: mol_type = other DNA
cataatttccctggcaacag

SEQ ID NO: 13158 - DNA, 20 bp, synthetic construct
  source 1..20: mol_type = other DNA
acatatgaggatgggtaaca

SEQ ID NO: 13159 - DNA, 20 bp, synthetic construct
  source 1..20: mol_type = other DNA
tcacttagaaaacttgaggg

SEQ ID NO: 13160 - DNA, 20 bp, synthetic construct
  source 1..20: mol_type = other DNA
aagcagattccttggtaagg

SEQ ID NO: 13161 - DNA, 20 bp, synthetic construct
  source 1..20: mol_type = other DNA
ctcttgggtttccctggatt

SEQ ID NO: 13162 - DNA, 20 bp, synthetic construct
  source 1..20: mol_type = other DNA
gttgttattgtcccacacgg

SEQ ID NO: 13163 - DNA, 20 bp, synthetic construct
  source 1..20: mol_type = other DNA
tggagataagcctgaggtag

SEQ ID NO: 13164 - DNA, 20 bp, synthetic construct
  source 1..20: mol_type = other DNA
tcacaacgttccaaaatccc

SEQ ID NO: 13165 - DNA, 20 bp, synthetic construct
  source 1..20: mol_type = other DNA
acatcgcatactctgttgtg

SEQ ID NO: 13166 - DNA, 20 bp, synthetic construct
  source 1..20: mol_type = other DNA
catgactgccactggaatga

SEQ ID NO: 13167 - DNA, 20 bp, synthetic construct
  source 1..20: mol_type = other DNA
atttctgttccaattcctcc

SEQ ID NO: 13168 - DNA, 20 bp, synthetic construct
  source 1..20: mol_type = other DNA
agatggctttcactgaatct

SEQ ID NO: 13169 - DNA, 20 bp, synthetic construct
  source 1..20: mol_type = other DNA
ttggaaatcatcaccacagg

SEQ ID NO: 13170 - DNA, 20 bp, synthetic construct
  source 1..20: mol_type = other DNA
ttctcactcagagaatcact

SEQ ID NO: 13171 - DNA, 20 bp, synthetic construct
  source 1..20: mol_type = other DNA
aaagatatgcgtgttggaag

SEQ ID NO: 13172 - DNA, 20 bp, synthetic construct
  source 1..20: mol_type = other DNA
tccttcatgcccaagacttt

SEQ ID NO: 13173 - DNA, 20 bp, synthetic construct
  source 1..20: mol_type = other DNA
gctgtgttctcacaagttca

SEQ ID NO: 13174 - DNA, 20 bp, synthetic construct
  source 1..20: mol_type = other DNA
cgtgggcaagccaagggttc

SEQ ID NO: 13175 - DNA, 20 bp, synthetic construct
  source 1..20: mol_type = other DNA
cgcgatctggtaccagaagg

SEQ ID NO: 13176 - DNA, 20 bp, synthetic construct
  source 1..20: mol_type = other DNA
ctttctctgcagaaatgttc

SEQ ID NO: 13177 - DNA, 20 bp, synthetic construct
  source 1..20: mol_type = other DNA
tagatcaaggcccaaatgct

SEQ ID NO: 13178 - DNA, 20 bp, synthetic construct
  source 1..20: mol_type = other DNA
aaatatgggaacctaggact

SEQ ID NO: 13179 - DNA, 20 bp, synthetic construct
  source 1..20: mol_type = other DNA
tttacccaaaatccttcccg

SEQ ID NO: 13180 - DNA, 20 bp, synthetic construct
  source 1..20: mol_type = other DNA
ccattgaagatgccattgaa

SEQ ID NO: 13181 - DNA, 20 bp, synthetic construct
  source 1..20: mol_type = other DNA
tccaccgtgtactcgaggcc

SEQ ID NO: 13182 - DNA, 20 bp, synthetic construct
  source 1..20: mol_type = other DNA
gatatcgagagctgttacaa

SEQ ID NO: 13183 - DNA, 20 bp, synthetic construct
  source 1..20: mol_type = other DNA
actccacttatcgcttcttc

SEQ ID NO: 13184 - DNA, 20 bp, synthetic construct
  source 1..20: mol_type = other DNA
aatagtagggcgattacaga

SEQ ID NO: 13185 - DNA, 20 bp, synthetic construct
  source 1..20: mol_type = other DNA
aggtgctgtagattcccatt

SEQ ID NO: 13186 - DNA, 20 bp, synthetic construct
  source 1..20: mol_type = other DNA
gttacttccaaactcttggt

SEQ ID NO: 13187 - DNA, 20 bp, synthetic construct
  source 1..20: mol_type = other DNA
acatttacacgtctgcggat

SEQ ID NO: 13188 - DNA, 20 bp, synthetic construct
  source 1..20: mol_type = other DNA
tacctgtgatctgtctttct

SEQ ID NO: 13189 - DNA, 20 bp, synthetic construct
  source 1..20: mol_type = other DNA
taatctaccacaaagttgcg

SEQ ID NO: 13190 - DNA, 20 bp, synthetic construct
  source 1..20: mol_type = other DNA
taatcctggcaggacaagga

SEQ ID NO: 13191 - DNA, 20 bp, synthetic construct
  source 1..20: mol_type = other DNA
caatggtctccttggaggtt

SEQ ID NO: 13192 - DNA, 20 bp, synthetic construct
  source 1..20: mol_type = other DNA
ttcacagctcagggtgacca

SEQ ID NO: 13193 - DNA, 20 bp, synthetic construct
  source 1..20: mol_type = other DNA
atttatggtccttccagtct

SEQ ID NO: 13194 - DNA, 20 bp, synthetic construct
  source 1..20: mol_type = other DNA
ctatctaagagtagcatgca

SEQ ID NO: 13195 - DNA, 20 bp, synthetic construct
  source 1..20: mol_type = other DNA
atccagtacacgttgggcct

SEQ ID NO: 13196 - DNA, 20 bp, synthetic construct
  source 1..20: mol_type = other DNA
tagcggctgtccacgttttc

SEQ ID NO: 13197 - DNA, 20 bp, synthetic construct
  source 1..20: mol_type = other DNA
tgtgctatagaacaggctca

SEQ ID NO: 13198 - DNA, 20 bp, synthetic construct
  source 1..20: mol_type = other DNA
gggtacgtgccaagcatcct

SEQ ID NO: 13199 - DNA, 20 bp, synthetic construct
  source 1..20: mol_type = other DNA
ggcgtggtcttgtagttgtt

SEQ ID NO: 13200 - DNA, 20 bp, synthetic construct
  source 1..20: mol_type = other DNA
accgctggtgtaatctcttc

SEQ ID NO: 13201 - DNA, 20 bp, synthetic construct
  source 1..20: mol_type = other DNA
tttgtcttggagaatcatgc

SEQ ID NO: 13202 - DNA, 20 bp, synthetic construct
  source 1..20: mol_type = other DNA
ataaaggaaagcaggctgcc

SEQ ID NO: 13203 - DNA, 20 bp, synthetic construct
  source 1..20: mol_type = other DNA
tctagtatttgcagggcact

SEQ ID NO: 13204 - DNA, 20 bp, synthetic construct
  source 1..20: mol_type = other DNA
aggtctccctcggcccacat

SEQ ID NO: 13205 - DNA, 20 bp, synthetic construct
  source 1..20: mol_type = other DNA
tacggaaggctatcactctg

SEQ ID NO: 13206 - DNA, 20 bp, synthetic construct
  source 1..20: mol_type = other DNA
gagcacttccctgggaattt

SEQ ID NO: 13207 - DNA, 20 bp, synthetic construct
  source 1..20: mol_type = other DNA
cattatagtgccagggtaga

SEQ ID NO: 13208 - DNA, 20 bp, synthetic construct
  source 1..20: mol_type = other DNA
ttctgctggctttgtagatg

SEQ ID NO: 13209 - DNA, 20 bp, synthetic construct
  source 1..20: mol_type = other DNA
ctttcatagaagcctgcttt

SEQ ID NO: 13210 - DNA, 20 bp, synthetic construct
  source 1..20: mol_type = other DNA
aatcagagcatatgacaggt

SEQ ID NO: 13211 - DNA, 20 bp, synthetic construct
  source 1..20: mol_type = other DNA
tccatagtcataggaagagc

SEQ ID NO: 13212 - DNA, 20 bp, synthetic construct
  source 1..20: mol_type = other DNA
tgcttgatgatttccaggag

SEQ ID NO: 13213 - DNA, 20 bp, synthetic construct
  source 1..20: mol_type = other DNA
ggttccttcatggagtcata

SEQ ID NO: 13214 - DNA, 20 bp, synthetic construct
  source 1..20: mol_type = other DNA
tagcttatgggaagggagtg

SEQ ID NO: 13215 - DNA, 20 bp, synthetic construct
  source 1..20: mol_type = other DNA
ttgttctataagcaggagag

SEQ ID NO: 13216 - DNA, 20 bp, synthetic construct
  source 1..20: mol_type = other DNA
agtccacttcagaaatgctg

SEQ ID NO: 13217 - DNA, 20 bp, synthetic construct
  source 1..20: mol_type = other DNA
cgtgatctgtcaccacataa

SEQ ID NO: 13218 - DNA, 20 bp, synthetic construct
  source 1..20: mol_type = other DNA
tgacggaagtacggctgcag

SEQ ID NO: 13219 - DNA, 20 bp, synthetic construct
  source 1..20: mol_type = other DNA
caaatgtaactagcgcctct

SEQ ID NO: 13220 - DNA, 20 bp, synthetic construct
  source 1..20: mol_type = other DNA
tgcgccatgtcatctttcac

SEQ ID NO: 13221 - DNA, 20 bp, synthetic construct
  source 1..20: mol_type = other DNA
cgacaggtcacatgagccta

SEQ ID NO: 13222 - DNA, 20 bp, synthetic construct
  source 1..20: mol_type = other DNA
atccgcttctcaatggttct

SEQ ID NO: 13223 - DNA, 20 bp, synthetic construct
  source 1..20: mol_type = other DNA
ttcaaaggtattccctcact

SEQ ID NO: 13224 - DNA, 20 bp, synthetic construct
  source 1..20: mol_type = other DNA
gaaggccaggtataatccgt

SEQ ID NO: 13225 - DNA, 20 bp, synthetic construct
  source 1..20: mol_type = other DNA
ggaacttgaggacagagtgt

SEQ ID NO: 13226 - DNA, 20 bp, synthetic construct
  source 1..20: mol_type = other DNA
acgaggagggaacgcgctgt

SEQ ID NO: 13227 - DNA, 20 bp, synthetic construct
  source 1..20: mol_type = other DNA
cgtcaagtacactgaaattc

SEQ ID NO: 13228 - DNA, 20 bp, synthetic construct
  source 1..20: mol_type = other DNA
gtagaaaagggaactgaaca

SEQ ID NO: 13229 - DNA, 20 bp, synthetic construct
  source 1..20: mol_type = other DNA
acttccatgaggtgttttct

SEQ ID NO: 13230 - DNA, 20 bp, synthetic construct
  source 1..20: mol_type = other DNA
tatggtgccatcatgcatga

SEQ ID NO: 13231 - DNA, 20 bp, synthetic construct
  source 1..20: mol_type = other DNA
cgcctcaaggaactgacgct

SEQ ID NO: 13232 - DNA, 20 bp, synthetic construct
  source 1..20: mol_type = other DNA
ttagaaatggaagatggcct

SEQ ID NO: 13233 - DNA, 20 bp, synthetic construct
  source 1..20: mol_type = other DNA
agtattattgtcaccgtggc

SEQ ID NO: 13234 - DNA, 20 bp, synthetic construct
  source 1..20: mol_type = other DNA
ggtgcgtgtttgttaaactc

SEQ ID NO: 13235 - DNA, 20 bp, synthetic construct
  source 1..20: mol_type = other DNA
gggatgctgtgaaagaaggt

SEQ ID NO: 13236 - DNA, 20 bp, synthetic construct
  source 1..20: mol_type = other DNA
ggagactgcacctgatggaa

SEQ ID NO: 13237 - DNA, 20 bp, synthetic construct
  source 1..20: mol_type = other DNA
gtcagaatgcctatctgccc

SEQ ID NO: 13238 - DNA, 20 bp, synthetic construct
  source 1..20: mol_type = other DNA
gcagtacagaaagtatcaca

SEQ ID NO: 13239 - DNA, 20 bp, synthetic construct
  source 1..20: mol_type = other DNA
caatactctgtgaagctggg

SEQ ID NO: 13240 - DNA, 20 bp, synthetic construct
  source 1..20: mol_type = other DNA
ctgagagattcatgctgatt

SEQ ID NO: 13241 - DNA, 20 bp, synthetic construct
  source 1..20: mol_type = other DNA
ggatatccagtgccttatcc

SEQ ID NO: 13242 - DNA, 20 bp, synthetic construct
  source 1..20: mol_type = other DNA
tcgagtcatgtacacaaccc

SEQ ID NO: 13243 - DNA, 20 bp, synthetic construct
  source 1..20: mol_type = other DNA
atccatcaagtttccatagg

SEQ ID NO: 13244 - DNA, 20 bp, synthetic construct
  source 1..20: mol_type = other DNA
cgattcaaaagccagatgcc

SEQ ID NO: 13245 - DNA, 20 bp, synthetic construct
  source 1..20: mol_type = other DNA
aggtttttacccagcacggc

SEQ ID NO: 13246 - DNA, 20 bp, synthetic construct
  source 1..20: mol_type = other DNA
tttggagatcgtgaagtcaa

SEQ ID NO: 13247 - DNA, 20 bp, synthetic construct
  source 1..20: mol_type = other DNA
agatgctaatacagcagccc

SEQ ID NO: 13248 - DNA, 20 bp, synthetic construct
  source 1..20: mol_type = other DNA
attccaccaggtcacctcct

SEQ ID NO: 13249 - DNA, 20 bp, synthetic construct
  source 1..20: mol_type = other DNA
gatatagcttggctctgtat

SEQ ID NO: 13250 - DNA, 20 bp, synthetic construct
  source 1..20: mol_type = other DNA
tgcagacagagcactgaagt

SEQ ID NO: 13251 - DNA, 20 bp, synthetic construct
  source 1..20: mol_type = other DNA
attcccttccacatggatta

SEQ ID NO: 13252 - DNA, 20 bp, synthetic construct
  source 1..20: mol_type = other DNA
tgatgctacatctgtggagt

SEQ ID NO: 13253 - DNA, 20 bp, synthetic construct
  source 1..20: mol_type = other DNA
tgttgttctcgtccctgaca

SEQ ID NO: 13254 - DNA, 20 bp, synthetic construct
  source 1..20: mol_type = other DNA
caagtcctagtgctaaactg

SEQ ID NO: 13255 - DNA, 20 bp, synthetic construct
  source 1..20: mol_type = other DNA
atttggagttcaggtagggt

SEQ ID NO: 13256 - DNA, 20 bp, synthetic construct
  source 1..20: mol_type = other DNA
ggctcaagtcctcgactgct

SEQ ID NO: 13257 - DNA, 20 bp, synthetic construct
  source 1..20: mol_type = other DNA
tgcacatgtggaggaattag

SEQ ID NO: 13258 - DNA, 20 bp, synthetic construct
  source 1..20: mol_type = other DNA
cactcctgacttgacactgt

SEQ ID NO: 13259 - DNA, 20 bp, synthetic construct
  source 1..20: mol_type = other DNA
gttcccaggagaattacggc

SEQ ID NO: 13260 - DNA, 20 bp, synthetic construct
  source 1..20: mol_type = other DNA
ccatggtacacactctgaat

SEQ ID NO: 13261 - DNA, 20 bp, synthetic construct
  source 1..20: mol_type = other DNA
gcacacgagtgcctgccatg

SEQ ID NO: 13262 - DNA, 20 bp, synthetic construct
  source 1..20: mol_type = other DNA
agagagagttgacttacaga

SEQ ID NO: 13263 - DNA, 20 bp, synthetic construct
  source 1..20: mol_type = other DNA
ggaatgcagagtaacagagt

SEQ ID NO: 13264 - DNA, 20 bp, synthetic construct
  source 1..20: mol_type = other DNA
cgaggacataaacagggtgt

SEQ ID NO: 13265 - DNA, 20 bp, synthetic construct
  source 1..20: mol_type = other DNA
cacatgaaaactgacacagg

SEQ ID NO: 13266 - DNA, 20 bp, synthetic construct
  source 1..20: mol_type = other DNA
agtacctcagttgcagccta

SEQ ID NO: 13267 - DNA, 20 bp, synthetic construct
  source 1..20: mol_type = other DNA
agcagttttcctgttcatct

SEQ ID NO: 13268 - DNA, 20 bp, synthetic construct
  source 1..20: mol_type = other DNA
ctgccaaagaccaagttctc

SEQ ID NO: 13269 - DNA, 20 bp, synthetic construct
  source 1..20: mol_type = other DNA
cgggttttgacctcctgaaa

SEQ ID NO: 13270 - DNA, 20 bp, synthetic construct
  source 1..20: mol_type = other DNA
gaatcgccattgctttaagt

SEQ ID NO: 13271 - DNA, 20 bp, synthetic construct
  source 1..20: mol_type = other DNA
cccgtctatttcaaagaaac

SEQ ID NO: 13272 - DNA, 20 bp, synthetic construct
  source 1..20: mol_type = other DNA
acatagagtgtagcagggca

SEQ ID NO: 13273 - DNA, 20 bp, synthetic construct
  source 1..20: mol_type = other DNA
gataagctaagctctcctgc

SEQ ID NO: 13274 - DNA, 20 bp, synthetic construct
  source 1..20: mol_type = other DNA
ctttctattccctgtcctac

SEQ ID NO: 13275 - DNA, 20 bp, synthetic construct
  source 1..20: mol_type = other DNA
gatgctcatgcactggtatg

SEQ ID NO: 13276 - DNA, 20 bp, synthetic construct
  source 1..20: mol_type = other DNA
gactccaaggatcatgcttt

SEQ ID NO: 13277 - DNA, 20 bp, synthetic construct
  source 1..20: mol_type = other DNA
agctgaagagagttcaagat

SEQ ID NO: 13278 - DNA, 20 bp, synthetic construct
  source 1..20: mol_type = other DNA
ctaagacctcatgcatggaa

SEQ ID NO: 13279 - DNA, 20 bp, synthetic construct
  source 1..20: mol_type = other DNA
tgttggcttttatccctatc

SEQ ID NO: 13280 - DNA, 20 bp, synthetic construct
  source 1..20: mol_type = other DNA
ttatgcgaccctttaaggtt

SEQ ID NO: 13281 - DNA, 20 bp, synthetic construct
  source 1..20: mol_type = other DNA
tagaatcattgtgtgttggc

SEQ ID NO: 13282 - DNA, 20 bp, synthetic construct
  source 1..20: mol_type = other DNA
tcacgaagtggtctttgatc

SEQ ID NO: 13283 - DNA, 20 bp, synthetic construct
  source 1..20: mol_type = other DNA
gctagactatcctctcatta

SEQ ID NO: 13284 - DNA, 20 bp, synthetic construct
  source 1..20: mol_type = other DNA
tgctctgaagacttgcagtg

SEQ ID NO: 13285 - DNA, 20 bp, synthetic construct
  source 1..20: mol_type = other DNA
gctactagttcccgcagcca

SEQ ID NO: 13286 - DNA, 20 bp, synthetic construct
  source 1..20: mol_type = other DNA
atgacttctcatctgccaac

SEQ ID NO: 13287 - DNA, 20 bp, synthetic construct
  source 1..20: mol_type = other DNA
tacagccctagatgtgacca

SEQ ID NO: 13288 - DNA, 20 bp, synthetic construct
  source 1..20: mol_type = other DNA
tatgctcatgacttcaactc

SEQ ID NO: 13289 - DNA, 20 bp, synthetic construct
  source 1..20: mol_type = other DNA
atcagctcccaaaatcttct

SEQ ID NO: 13290 - DNA, 20 bp, synthetic construct
  source 1..20: mol_type = other DNA
ttgtcagcttttgttggttg

SEQ ID NO: 13291 - DNA, 20 bp, synthetic construct
  source 1..20: mol_type = other DNA
ggcaagactccatccattcc

SEQ ID NO: 13292 - DNA, 20 bp, synthetic construct
  source 1..20: mol_type = other DNA
tgctgtgtgagttcagatac

SEQ ID NO: 13293 - DNA, 20 bp, synthetic construct
  source 1..20: mol_type = other DNA
taatctttacagacggttcc

SEQ ID NO: 13294 - DNA, 20 bp, synthetic construct
  source 1..20: mol_type = other DNA
accagaatgtccaaggtcga

SEQ ID NO: 13295 - DNA, 20 bp, synthetic construct
  source 1..20: mol_type = other DNA
cagagcaaccaaaaggaccc

SEQ ID NO: 13296 - DNA, 20 bp, synthetic construct
  source 1..20: mol_type = other DNA
gtcatgccatcttccaagga

SEQ ID NO: 13297 - DNA, 20 bp, synthetic construct
  source 1..20: mol_type = other DNA
cgttttgtgggcaccgtaac

SEQ ID NO: 13298 - DNA, 20 bp, synthetic construct
  source 1..20: mol_type = other DNA
aacgttgcctcccagcacac

SEQ ID NO: 13299 - DNA, 20 bp, synthetic construct
  source 1..20: mol_type = other DNA
gacattctggactgattgct

SEQ ID NO: 13300 - DNA, 20 bp, synthetic construct
  source 1..20: mol_type = other DNA
acgtgtatgagcctgatggt

SEQ ID NO: 13301 - DNA, 20 bp, synthetic construct
  source 1..20: mol_type = other DNA
actagagtgcctgtacctta

SEQ ID NO: 13302 - DNA, 20 bp, synthetic construct
  source 1..20: mol_type = other DNA
atgagtcaagttagtcacag

SEQ ID NO: 13303 - DNA, 20 bp, synthetic construct
  source 1..20: mol_type = other DNA
gtaaaatctgcctgtacttc

SEQ ID NO: 13304 - DNA, 20 bp, synthetic construct
  source 1..20: mol_type = other DNA
cgacacctccctgttataaa

SEQ ID NO: 13305 - DNA, 20 bp, synthetic construct
  source 1..20: mol_type = other DNA
taaacagtgacgcaaatgcc

SEQ ID NO: 13306 - DNA, 20 bp, synthetic construct
  source 1..20: mol_type = other DNA
ccaatgcctgatcctcttct

SEQ ID NO: 13307 - DNA, 20 bp, synthetic construct
  source 1..20: mol_type = other DNA
tactgcagctattttctagc

SEQ ID NO: 13308 - DNA, 20 bp, synthetic construct
  source 1..20: mol_type = other DNA
taactcttgtatctgatggc

SEQ ID NO: 13309 - DNA, 20 bp, synthetic construct
  source 1..20: mol_type = other DNA
cgttgtgacagaaatcatac

SEQ ID NO: 13310 - DNA, 20 bp, synthetic construct
  source 1..20: mol_type = other DNA
ggtgcaataagtgttggcaa

SEQ ID NO: 13311 - DNA, 20 bp, synthetic construct
  source 1..20: mol_type = other DNA
atatggaaagcagatgcagt

SEQ ID NO: 13312 - DNA, 20 bp, synthetic construct
  source 1..20: mol_type = other DNA
gctattgaggtagacagaag

SEQ ID NO: 13313 - DNA, 20 bp, synthetic construct
  source 1..20: mol_type = other DNA
gtggctaacatttctttagg

SEQ ID NO: 13314 - DNA, 20 bp, synthetic construct
  source 1..20: mol_type = other DNA
ttgttgaatagcatccactg

SEQ ID NO: 13315 - DNA, 20 bp, synthetic construct
  source 1..20: mol_type = other DNA
ggagttcggtttcctgggtt

SEQ ID NO: 13316 - DNA, 20 bp, synthetic construct
  source 1..20: mol_type = other DNA
atgggtctttgccatggacc

SEQ ID NO: 13317 - DNA, 20 bp, synthetic construct
  source 1..20: mol_type = other DNA
ccaagctaggagagttcttt

SEQ ID NO: 13318 - DNA, 20 bp, synthetic construct
  source 1..20: mol_type = other DNA
atgactaccagtcagttagc

SEQ ID NO: 13319 - DNA, 20 bp, synthetic construct
  source 1..20: mol_type = other DNA
ttcagaagttgcagaatgag

SEQ ID NO: 13320 - DNA, 20 bp, synthetic construct
  source 1..20: mol_type = other DNA
ttacaaggcctctataagac

SEQ ID NO: 13321 - DNA, 20 bp, synthetic construct
  source 1..20: mol_type = other DNA
gaaggatgtcctgtttctag

SEQ ID NO: 13322 - DNA, 20 bp, synthetic construct
  source 1..20: mol_type = other DNA
gattttgtggttcctgtccc

SEQ ID NO: 13323 - DNA, 20 bp, synthetic construct
  source 1..20: mol_type = other DNA
gctctatcgcaagactattt

SEQ ID NO: 13324 - DNA, 20 bp, synthetic construct
  source 1..20: mol_type = other DNA
ttccgtagcgcccgcgtctg

SEQ ID NO: 13325 - DNA, 20 bp, synthetic construct
  source 1..20: mol_type = other DNA
atgcctttctctgttccgac

SEQ ID NO: 13326 - DNA, 20 bp, synthetic construct
  source 1..20: mol_type = other DNA
aaacactgcttccactaatg

SEQ ID NO: 13327 - DNA, 20 bp, synthetic construct
  source 1..20: mol_type = other DNA
tgaggcataatgttccctga

SEQ ID NO: 13328 - DNA, 20 bp, synthetic construct
  source 1..20: mol_type = other DNA
ctggcattctctaaggatct

SEQ ID NO: 13329 - DNA, 20 bp, synthetic construct
  source 1..20: mol_type = other DNA
ggacaaggctccgtaagtat

SEQ ID NO: 13330 - DNA, 20 bp, synthetic construct
  source 1..20: mol_type = other DNA
tggttggccctaaatcaagc

SEQ ID NO: 13331 - DNA, 20 bp, synthetic construct
  source 1..20: mol_type = other DNA
gtggaactataagatgggat

SEQ ID NO: 13332 - DNA, 20 bp, synthetic construct
  source 1..20: mol_type = other DNA
caaaacaactctgggacaca

SEQ ID NO: 13333 - DNA, 20 bp, synthetic construct
  source 1..20: mol_type = other DNA
gcttttcagtcagcttgcag

SEQ ID NO: 13334 - DNA, 20 bp, synthetic construct
  source 1..20: mol_type = other DNA
gggatagacagcttgggctg

SEQ ID NO: 13335 - DNA, 20 bp, synthetic construct
  source 1..20: mol_type = other DNA
gatgcgttcctaggattctt

SEQ ID NO: 13336 - DNA, 20 bp, synthetic construct
  source 1..20: mol_type = other DNA
ttcaagtataacctggtcca

SEQ ID NO: 13337 - DNA, 20 bp, synthetic construct
  source 1..20: mol_type = other DNA
gacacagcctagacagcctg

SEQ ID NO: 13338 - DNA, 20 bp, synthetic construct
  source 1..20: mol_type = other DNA
tcatgaggactataccttca

SEQ ID NO: 13339 - DNA, 20 bp, synthetic construct
  source 1..20: mol_type = other DNA
tgatgggaaaagctgacttt

SEQ ID NO: 13340 - DNA, 20 bp, synthetic construct
  source 1..20: mol_type = other DNA
gcgtgaggcccagaccttaa

SEQ ID NO: 13341 - DNA, 20 bp, synthetic construct
  source 1..20: mol_type = other DNA
ggaaagaacggtctgttcaa

SEQ ID NO: 13342 - DNA, 20 bp, synthetic construct
  source 1..20: mol_type = other DNA
gagagagtttctacggatga

SEQ ID NO: 13343 - DNA, 20 bp, synthetic construct
  source 1..20: mol_type = other DNA
gcagttgcggaactactcta

SEQ ID NO: 13344 - DNA, 20 bp, synthetic construct
  source 1..20: mol_type = other DNA
acattacaccacggtggcta

SEQ ID NO: 13345 - DNA, 20 bp, synthetic construct
  source 1..20: mol_type = other DNA
tatccatgaatagagacagc

SEQ ID NO: 13346 - DNA, 20 bp, synthetic construct
  source 1..20: mol_type = other DNA
cgttagccacatagcacttg

SEQ ID NO: 13347 - DNA, 20 bp, synthetic construct
  source 1..20: mol_type = other DNA
caagtgccactgctacaaca

SEQ ID NO: 13348 - DNA, 20 bp, synthetic construct
  source 1..20: mol_type = other DNA
taattaccctctgctgaaac

SEQ ID NO: 13349 - DNA, 20 bp, synthetic construct
  source 1..20: mol_type = other DNA
cgccaatccaaagaaaggaa

SEQ ID NO: 13350 - DNA, 20 bp, synthetic construct
  source 1..20: mol_type = other DNA
cagaaggtgttgctctgagg

SEQ ID NO: 13351 - DNA, 20 bp, synthetic construct
  source 1..20: mol_type = other DNA
atgtagtggaatgatagtgg

SEQ ID NO: 13352 - DNA, 20 bp, synthetic construct
  source 1..20: mol_type = other DNA
agccctgataacccttgctc

SEQ ID NO: 13353 - DNA, 20 bp, synthetic construct
  source 1..20: mol_type = other DNA
aattctctggattaccaggt

SEQ ID NO: 13354 - DNA, 20 bp, synthetic construct
  source 1..20: mol_type = other DNA
gggaagatgcacagctgctt

SEQ ID NO: 13355 - DNA, 20 bp, synthetic construct
  source 1..20: mol_type = other DNA
tacaaggccctgagttatct

SEQ ID NO: 13356 - DNA, 20 bp, synthetic construct
  source 1..20: mol_type = other DNA
tgaagcctaaacacctgtga

SEQ ID NO: 13357 - DNA, 20 bp, synthetic construct
  source 1..20: mol_type = other DNA
actttgaaggaagtctgagc

SEQ ID NO: 13358 - DNA, 20 bp, synthetic construct
  source 1..20: mol_type = other DNA
cctagactcaatcactgcct

SEQ ID NO: 13359 - DNA, 20 bp, synthetic construct
  source 1..20: mol_type = other DNA
acggaccagaccatgctgac

SEQ ID NO: 13360 - DNA, 20 bp, synthetic construct
  source 1..20: mol_type = other DNA
acaactttggccttggaaaa

SEQ ID NO: 13361 - DNA, 20 bp, synthetic construct
  source 1..20: mol_type = other DNA
acagtaggaagatctggctg

SEQ ID NO: 13362 - DNA, 20 bp, synthetic construct
  source 1..20: mol_type = other DNA
ttgtcttgtgatggagttct

SEQ ID NO: 13363 - DNA, 20 bp, synthetic construct
  source 1..20: mol_type = other DNA
cacgtagtaaatgcccagta

SEQ ID NO: 13364 - DNA, 20 bp, synthetic construct
  source 1..20: mol_type = other DNA
tacgacagaaaagtgacctg

SEQ ID NO: 13365 - DNA, 20 bp, synthetic construct
  source 1..20: mol_type = other DNA
gctaactcttttcataaccc

SEQ ID NO: 13366 - DNA, 20 bp, synthetic construct
  source 1..20: mol_type = other DNA
tcgcaaaaggttgtctagaa

SEQ ID NO: 13367 - DNA, 20 bp, synthetic construct
  source 1..20: mol_type = other DNA
cggaccttgggctacttaaa

SEQ ID NO: 13368 - DNA, 20 bp, synthetic construct
  source 1..20: mol_type = other DNA
aagccgtcatgttagaggcg

SEQ ID NO: 13369 - DNA, 20 bp, synthetic construct
  source 1..20: mol_type = other DNA
aagacgcgatagataggcct

SEQ ID NO: 13370 - DNA, 20 bp, synthetic construct
  source 1..20: mol_type = other DNA
tcgagcagttaaccaggcaa

SEQ ID NO: 13371 - DNA, 20 bp, synthetic construct
  source 1..20: mol_type = other DNA
gataactattcacccagcgc

SEQ ID NO: 13372 - DNA, 20 bp, synthetic construct
  source 1..20: mol_type = other DNA
tcggcgtgcgcattttcgtg

SEQ ID NO: 13373 - DNA, 20 bp, synthetic construct
  source 1..20: mol_type = other DNA
ctagagcgacaccaacatcg

SEQ ID NO: 13374 - DNA, 20 bp, synthetic construct
  source 1..20: mol_type = other DNA
agataggcctaagtgggcct

SEQ ID NO: 13375 - DNA, 20 bp, synthetic construct
  source 1..20: mol_type = other DNA
ggaacgtattccgccgcaca

SEQ ID NO: 13376 - DNA, 20 bp, synthetic construct
  source 1..20: mol_type = other DNA
gttaattggccctgtacctt

SEQ ID NO: 13377 - DNA, 20 bp, synthetic construct
  source 1..20: mol_type = other DNA
agcagatttacgttgagggc

SEQ ID NO: 13378 - DNA, 20 bp, synthetic construct
  source 1..20: mol_type = other DNA
aaccctcgtaatagggctgc

SEQ ID NO: 13379 - DNA, 20 bp, synthetic construct
  source 1..20: mol_type = other DNA
cgtggtatcgggtggttgtg

SEQ ID NO: 13380 - DNA, 20 bp, synthetic construct
  source 1..20: mol_type = other DNA
ggagatgaactaccacgctt

SEQ ID NO: 13381 - DNA, 20 bp, synthetic construct
  source 1..20: mol_type = other DNA
tacagttctcctatcaaggt

SEQ ID NO: 13382 - DNA, 20 bp, synthetic construct
  source 1..20: mol_type = other DNA
aaaaagacgcgatagatagg

SEQ ID NO: 13383 - DNA, 20 bp, synthetic construct
  source 1..20: mol_type = other DNA
atacggaacttcgcaaaagt

SEQ ID NO: 13384 - DNA, 20 bp, synthetic construct
  source 1..20: mol_type = other DNA
tacgacagaaaagtgacctg

SEQ ID NO: 13385 - DNA, 20 bp, synthetic construct
  source 1..20: mol_type = other DNA
gctaactcttttcataaccc

SEQ ID NO: 13386 - DNA, 20 bp, synthetic construct
  source 1..20: mol_type = other DNA
tcgcaaaaggttgtctagaa

SEQ ID NO: 13387 - DNA, 20 bp, synthetic construct
  source 1..20: mol_type = other DNA
cggaccttgggctacttaaa

SEQ ID NO: 13388 - DNA, 20 bp, synthetic construct
  source 1..20: mol_type = other DNA
aagccgtcatgttagaggcg

SEQ ID NO: 13389 - DNA, 20 bp, synthetic construct
  source 1..20: mol_type = other DNA
aagacgcgatagataggcct

SEQ ID NO: 13390 - DNA, 20 bp, synthetic construct
  source 1..20: mol_type = other DNA
tcgagcagttaaccaggcaa

SEQ ID NO: 13391 - DNA, 20 bp, synthetic construct
  source 1..20: mol_type = other DNA
gataactattcacccagcgc

SEQ ID NO: 13392 - DNA, 20 bp, synthetic construct
  source 1..20: mol_type = other DNA
tcggcgtgcgcattttcgtg

SEQ ID NO: 13393 - DNA, 20 bp, synthetic construct
  source 1..20: mol_type = other DNA
ctagagcgacaccaacatcg

SEQ ID NO: 13394 - DNA, 20 bp, synthetic construct
  source 1..20: mol_type = other DNA
gcgacatatctagcaaaaca

SEQ ID NO: 13395 - DNA, 20 bp, synthetic construct
  source 1..20: mol_type = other DNA
cgttgggcgctgtccaaggt

SEQ ID NO: 13396 - DNA, 20 bp, synthetic construct
  source 1..20: mol_type = other DNA
ggcatttcgcattcttagga

SEQ ID NO: 13397 - DNA, 20 bp, synthetic construct
  source 1..20: mol_type = other DNA
tcggcttcatcgggacgccg

SEQ ID NO: 13398 - DNA, 20 bp, synthetic construct
  source 1..20: mol_type = other DNA
acggcgtattaaggtcgtac

SEQ ID NO: 13399 - DNA, 20 bp, synthetic construct
  source 1..20: mol_type = other DNA
gtaaaacgttgggcgctgtc

SEQ ID NO: 13400 - DNA, 20 bp, synthetic construct
  source 1..20: mol_type = other DNA
ttggcatccctaaacaacga

SEQ ID NO: 13401 - DNA, 20 bp, synthetic construct
  source 1..20: mol_type = other DNA
ggttaccgtaatacttcaga

SEQ ID NO: 13402 - DNA, 20 bp, synthetic construct
  source 1..20: mol_type = other DNA
cgtcactctgtatgtccgtg

SEQ ID NO: 13403 - DNA, 20 bp, synthetic construct
  source 1..20: mol_type = other DNA
tgatcagtcaactcaagcga

SEQ ID NO: 13404 - DNA, 20 bp, synthetic construct
  source 1..20: mol_type = other DNA
tacgacagaaaagtgacctg

SEQ ID NO: 13405 - DNA, 20 bp, synthetic construct
  source 1..20: mol_type = other DNA
gctaactcttttcataaccc

SEQ ID NO: 13406 - DNA, 20 bp, synthetic construct
  source 1..20: mol_type = other DNA
tcgcaaaaggttgtctagaa

SEQ ID NO: 13407 - DNA, 20 bp, synthetic construct
  source 1..20: mol_type = other DNA
cggaccttgggctacttaaa

SEQ ID NO: 13408 - DNA, 20 bp, synthetic construct
  source 1..20: mol_type = other DNA
aagccgtcatgttagaggcg

SEQ ID NO: 13409 - DNA, 20 bp, synthetic construct
  source 1..20: mol_type = other DNA
aagacgcgatagataggcct

SEQ ID NO: 13410 - DNA, 20 bp, synthetic construct
  source 1..20: mol_type = other DNA
tcgagcagttaaccaggcaa

SEQ ID NO: 13411 - DNA, 20 bp, synthetic construct
  source 1..20: mol_type = other DNA
gataactattcacccagcgc

SEQ ID NO: 13412 - DNA, 20 bp, synthetic construct
  source 1..20: mol_type = other DNA
tcggcgtgcgcattttcgtg

SEQ ID NO: 13413 - DNA, 20 bp, synthetic construct
  source 1..20: mol_type = other DNA
ctagagcgacaccaacatcg

SEQ ID NO: 13414 - DNA, 20 bp, synthetic construct
  source 1..20: mol_type = other DNA
cagcgcgtgtcgtaaaaaaa

SEQ ID NO: 13415 - DNA, 20 bp, synthetic construct
  source 1..20: mol_type = other DNA
tagcctaaaggttcttgcag

SEQ ID NO: 13416 - DNA, 20 bp, synthetic construct
  source 1..20: mol_type = other DNA
tgaccatatacggcgtatta

SEQ ID NO: 13417 - DNA, 20 bp, synthetic construct
  source 1..20: mol_type = other DNA
tagacccaaacccgactagt

SEQ ID NO: 13418 - DNA, 20 bp, synthetic construct
  source 1..20: mol_type = other DNA
tgcggatctttaggttgacc

SEQ ID NO: 13419 - DNA, 20 bp, synthetic construct
  source 1..20: mol_type = other DNA
agcctaaaggttcttgcaga

SEQ ID NO: 13420 - DNA, 20 bp, synthetic construct
  source 1..20: mol_type = other DNA
taagcggttaccacaggcgc

SEQ ID NO: 13421 - DNA, 20 bp, synthetic construct
  source 1..20: mol_type = other DNA
ccaattagcagagtgtcagg

SEQ ID NO: 13422 - DNA, 20 bp, synthetic construct
  source 1..20: mol_type = other DNA
cattggcggtgacttgagac

SEQ ID NO: 13423 - DNA, 20 bp, synthetic construct
  source 1..20: mol_type = other DNA
tgatacgcccgggactacgg

SEQ ID NO: 13424 - DNA, 20 bp, synthetic construct
  source 1..20: mol_type = other DNA
tacgacagaaaagtgacctg

SEQ ID NO: 13425 - DNA, 20 bp, synthetic construct
  source 1..20: mol_type = other DNA
gctaactcttttcataaccc

SEQ ID NO: 13426 - DNA, 20 bp, synthetic construct
  source 1..20: mol_type = other DNA
tcgcaaaaggttgtctagaa

SEQ ID NO: 13427 - DNA, 20 bp, synthetic construct
  source 1..20: mol_type = other DNA
cggaccttgggctacttaaa

SEQ ID NO: 13428 - DNA, 20 bp, synthetic construct
  source 1..20: mol_type = other DNA
aagccgtcatgttagaggcg

SEQ ID NO: 13429 - DNA, 20 bp, synthetic construct
  source 1..20: mol_type = other DNA
aagacgcgatagataggcct

SEQ ID NO: 13430 - DNA, 20 bp, synthetic construct
  source 1..20: mol_type = other DNA
tcgagcagttaaccaggcaa

SEQ ID NO: 13431 - DNA, 20 bp, synthetic construct
  source 1..20: mol_type = other DNA
gataactattcacccagcgc

SEQ ID NO: 13432 - DNA, 20 bp, synthetic construct
  source 1..20: mol_type = other DNA
tcggcgtgcgcattttcgtg

SEQ ID NO: 13433 - DNA, 20 bp, synthetic construct
  source 1..20: mol_type = other DNA
ctagagcgacaccaacatcg

SEQ ID NO: 13434 - DNA, 20 bp, synthetic construct
  source 1..20: mol_type = other DNA
gttatcttccgcgagttccg

SEQ ID NO: 13435 - DNA, 20 bp, synthetic construct
  source 1..20: mol_type = other DNA
ttgattgtatcacttcgcga

SEQ ID NO: 13436 - DNA, 20 bp, synthetic construct
  source 1..20: mol_type = other DNA
catccaatcacggaatcaag

SEQ ID NO: 13437 - DNA, 20 bp, synthetic construct
  source 1..20: mol_type = other DNA
tcaagtccgaatctctagat

SEQ ID NO: 13438 - DNA, 20 bp, synthetic construct
  source 1..20: mol_type = other DNA
tagacggcatctcacagtca

SEQ ID NO: 13439 - DNA, 20 bp, synthetic construct
  source 1..20: mol_type = other DNA
tcagtcctatagcgaggcca

SEQ ID NO: 13440 - DNA, 20 bp, synthetic construct
  source 1..20: mol_type = other DNA
gacgcattcctgcatcaata

SEQ ID NO: 13441 - DNA, 20 bp, synthetic construct
  source 1..20: mol_type = other DNA
gggttctgtcgaatttgctc

SEQ ID NO: 13442 - DNA, 20 bp, synthetic construct
  source 1..20: mol_type = other DNA
acaggccgctaaagacgttc

SEQ ID NO: 13443 - DNA, 20 bp, synthetic construct
  source 1..20: mol_type = other DNA
aaagacgttctactccgcca

SEQ ID NO: 13444 - DNA, 20 bp, synthetic construct
  source 1..20: mol_type = other DNA
tacgacagaaaagtgacctg

SEQ ID NO: 13445 - DNA, 20 bp, synthetic construct
  source 1..20: mol_type = other DNA
gctaactcttttcataaccc

SEQ ID NO: 13446 - DNA, 20 bp, synthetic construct
  source 1..20: mol_type = other DNA
tcgcaaaaggttgtctagaa

SEQ ID NO: 13447 - DNA, 20 bp, synthetic construct
  source 1..20: mol_type = other DNA
cggaccttgggctacttaaa

SEQ ID NO: 13448 - DNA, 20 bp, synthetic construct
  source 1..20: mol_type = other DNA
aagccgtcatgttagaggcg

SEQ ID NO: 13449 - DNA, 20 bp, synthetic construct
  source 1..20: mol_type = other DNA
aagacgcgatagataggcct

SEQ ID NO: 13450 - DNA, 20 bp, synthetic construct
  source 1..20: mol_type = other DNA
tcgagcagttaaccaggcaa

SEQ ID NO: 13451 - DNA, 20 bp, synthetic construct
  source 1..20: mol_type = other DNA
gataactattcacccagcgc

SEQ ID NO: 13452 - DNA, 20 bp, synthetic construct
  source 1..20: mol_type = other DNA
tcggcgtgcgcattttcgtg

SEQ ID NO: 13453 - DNA, 20 bp, synthetic construct
  source 1..20: mol_type = other DNA
ctagagcgacaccaacatcg

SEQ ID NO: 13454 - DNA, 20 bp, synthetic construct
  source 1..20: mol_type = other DNA
cgcattcttaggatctaaac

SEQ ID NO: 13455 - DNA, 20 bp, synthetic construct
  source 1..20: mol_type = other DNA
tgccatacagttaggtgcta

SEQ ID NO: 13456 - DNA, 20 bp, synthetic construct
  source 1..20: mol_type = other DNA
ccctgaagcagtgagcgtgg

SEQ ID NO: 13457 - DNA, 20 bp, synthetic construct
  source 1..20: mol_type = other DNA
agggcgagcgtcgcagatta

SEQ ID NO: 13458 - DNA, 20 bp, synthetic construct
  source 1..20: mol_type = other DNA
ccagattatctcgcggtgga

SEQ ID NO: 13459 - DNA, 20 bp, synthetic construct
  source 1..20: mol_type = other DNA
tcgtttacgaaacaggtcgc

SEQ ID NO: 13460 - DNA, 20 bp, synthetic construct
  source 1..20: mol_type = other DNA
ggcctaacgagtttgatacg

SEQ ID NO: 13461 - DNA, 20 bp, synthetic construct
  source 1..20: mol_type = other DNA
taaaggcccgtgccgccgga

SEQ ID NO: 13462 - DNA, 20 bp, synthetic construct
  source 1..20: mol_type = other DNA
ggttggttcctcttgaagcg

SEQ ID NO: 13463 - DNA, 20 bp, synthetic construct
  source 1..20: mol_type = other DNA
gtttgataagcgtgttctag

SEQ ID NO: 13464 - DNA, 20 bp, synthetic construct
  source 1..20: mol_type = other DNA
tacgacagaaaagtgacctg

SEQ ID NO: 13465 - DNA, 20 bp, synthetic construct
  source 1..20: mol_type = other DNA
gctaactcttttcataaccc

SEQ ID NO: 13466 - DNA, 20 bp, synthetic construct
  source 1..20: mol_type = other DNA
tcgcaaaaggttgtctagaa

SEQ ID NO: 13467 - DNA, 20 bp, synthetic construct
  source 1..20: mol_type = other DNA
cggaccttgggctacttaaa

SEQ ID NO: 13468 - DNA, 20 bp, synthetic construct
  source 1..20: mol_type = other DNA
aagccgtcatgttagaggcg

SEQ ID NO: 13469 - DNA, 20 bp, synthetic construct
  source 1..20: mol_type = other DNA
aagacgcgatagataggcct

SEQ ID NO: 13470 - DNA, 20 bp, synthetic construct
  source 1..20: mol_type = other DNA
tcgagcagttaaccaggcaa

SEQ ID NO: 13471 - DNA, 20 bp, synthetic construct
  source 1..20: mol_type = other DNA
gataactattcacccagcgc

SEQ ID NO: 13472 - DNA, 20 bp, synthetic construct
  source 1..20: mol_type = other DNA
tcggcgtgcgcattttcgtg

SEQ ID NO: 13473 - DNA, 20 bp, synthetic construct
  source 1..20: mol_type = other DNA
ctagagcgacaccaacatcg

SEQ ID NO: 13474 - DNA, 20 bp, synthetic construct
  source 1..20: mol_type = other DNA
cttccgcgagttccgcccaa

SEQ ID NO: 13475 - DNA, 20 bp, synthetic construct
  source 1..20: mol_type = other DNA
ggacttgcagctcgtaacgc

SEQ ID NO: 13476 - DNA, 20 bp, synthetic construct
  source 1..20: mol_type = other DNA
gtacagcacgtacgttatat

SEQ ID NO: 13477 - DNA, 20 bp, synthetic construct
  source 1..20: mol_type = other DNA
ccaactaggtggacaaacct

SEQ ID NO: 13478 - DNA, 20 bp, synthetic construct
  source 1..20: mol_type = other DNA
atgtgctcgcttgcccatca

SEQ ID NO: 13479 - DNA, 20 bp, synthetic construct
  source 1..20: mol_type = other DNA
gcctaacgagtttgatacgc

SEQ ID NO: 13480 - DNA, 20 bp, synthetic construct
  source 1..20: mol_type = other DNA
tacgatgtgtttgcataagc

SEQ ID NO: 13481 - DNA, 20 bp, synthetic construct
  source 1..20: mol_type = other DNA
agtagaaaacgagatagggt

SEQ ID NO: 13482 - DNA, 20 bp, synthetic construct
  source 1..20: mol_type = other DNA
gggatacttggtcaaagctc

SEQ ID NO: 13483 - DNA, 20 bp, synthetic construct
  source 1..20: mol_type = other DNA
gccattgccacgaggttctc

SEQ ID NO: 13484 - DNA, 20 bp, synthetic construct
  source 1..20: mol_type = other DNA
ggcaaaggctgagccatacc

SEQ ID NO: 13485 - DNA, 20 bp, synthetic construct
  source 1..20: mol_type = other DNA
ctgggaaggaatcattcaca

SEQ ID NO: 13486 - DNA, 20 bp, synthetic construct
  source 1..20: mol_type = other DNA
tgtgcttcgtcacccacgta

SEQ ID NO: 13487 - DNA, 20 bp, synthetic construct
  source 1..20: mol_type = other DNA
ggtttcctggtcatgaccgg

SEQ ID NO: 13488 - DNA, 20 bp, synthetic construct
  source 1..20: mol_type = other DNA
ggaggaggctctgagttagt

SEQ ID NO: 13489 - DNA, 20 bp, synthetic construct
  source 1..20: mol_type = other DNA
tgatgtgcttgtcttccata

SEQ ID NO: 13490 - DNA, 20 bp, synthetic construct
  source 1..20: mol_type = other DNA
ctgaaaatcaacgctgccat

SEQ ID NO: 13491 - DNA, 20 bp, synthetic construct
  source 1..20: mol_type = other DNA
cttgcagaaccagttccctc

SEQ ID NO: 13492 - DNA, 20 bp, synthetic construct
  source 1..20: mol_type = other DNA
gcaaaagtgcctcaatccat

SEQ ID NO: 13493 - DNA, 20 bp, synthetic construct
  source 1..20: mol_type = other DNA
cacaaagcaattacggtaga

SEQ ID NO: 13494 - DNA, 20 bp, synthetic construct
  source 1..20: mol_type = other DNA
ccaactccaaagagacatat

SEQ ID NO: 13495 - DNA, 20 bp, synthetic construct
  source 1..20: mol_type = other DNA
ctcttcatcttccacaatag

SEQ ID NO: 13496 - DNA, 20 bp, synthetic construct
  source 1..20: mol_type = other DNA
tgcgctctttgaccgcgcgc

SEQ ID NO: 13497 - DNA, 20 bp, synthetic construct
  source 1..20: mol_type = other DNA
gacctctttgcttaacttga

SEQ ID NO: 13498 - DNA, 20 bp, synthetic construct
  source 1..20: mol_type = other DNA
gcaatacctggcttttctca

SEQ ID NO: 13499 - DNA, 20 bp, synthetic construct
  source 1..20: mol_type = other DNA
tcttcgtcttggccctcgac

SEQ ID NO: 13500 - DNA, 20 bp, synthetic construct
  source 1..20: mol_type = other DNA
tggttgtggtcatagcgccg

SEQ ID NO: 13501 - DNA, 20 bp, synthetic construct
  source 1..20: mol_type = other DNA
ttgtcgatagcaccatcagg

SEQ ID NO: 13502 - DNA, 20 bp, synthetic construct
  source 1..20: mol_type = other DNA
tcctcagcttcagaaatgtt

SEQ ID NO: 13503 - DNA, 20 bp, synthetic construct
  source 1..20: mol_type = other DNA
gagggtctctgtctttagag

SEQ ID NO: 13504 - DNA, 20 bp, synthetic construct
  source 1..20: mol_type = other DNA
cacaccaatggagaaatagt

SEQ ID NO: 13505 - DNA, 20 bp, synthetic construct
  source 1..20: mol_type = other DNA
tctccaccacaggccaaaac

SEQ ID NO: 13506 - DNA, 20 bp, synthetic construct
  source 1..20: mol_type = other DNA
gtagctgaagccttgccggt

SEQ ID NO: 13507 - DNA, 20 bp, synthetic construct
  source 1..20: mol_type = other DNA
tcaacctggtcactctcatc

SEQ ID NO: 13508 - DNA, 20 bp, synthetic construct
  source 1..20: mol_type = other DNA
ctgctgtcacagtgttgagg

SEQ ID NO: 13509 - DNA, 20 bp, synthetic construct
  source 1..20: mol_type = other DNA
ccctccttcaggacgggaat

SEQ ID NO: 13510 - DNA, 20 bp, synthetic construct
  source 1..20: mol_type = other DNA
ggagcagaccacctcgtcac

SEQ ID NO: 13511 - DNA, 20 bp, synthetic construct
  source 1..20: mol_type = other DNA
gcagcggtcattcagatatg

SEQ ID NO: 13512 - DNA, 20 bp, synthetic construct
  source 1..20: mol_type = other DNA
tgtggcaaaggcaataaaag

SEQ ID NO: 13513 - DNA, 20 bp, synthetic construct
  source 1..20: mol_type = other DNA
tccagcagacgccctcgacg

SEQ ID NO: 13514 - DNA, 20 bp, synthetic construct
  source 1..20: mol_type = other DNA
aaggtgagattctgcaggac

SEQ ID NO: 13515 - DNA, 20 bp, synthetic construct
  source 1..20: mol_type = other DNA
agaggcaaaagattccagtt

SEQ ID NO: 13516 - DNA, 20 bp, synthetic construct
  source 1..20: mol_type = other DNA
tcacctcgatggtgaacggt

SEQ ID NO: 13517 - DNA, 20 bp, synthetic construct
  source 1..20: mol_type = other DNA
aggtccaatgatgttgaagg

SEQ ID NO: 13518 - DNA, 20 bp, synthetic construct
  source 1..20: mol_type = other DNA
gcagcccttgagcacatttc

SEQ ID NO: 13519 - DNA, 20 bp, synthetic construct
  source 1..20: mol_type = other DNA
gtctctcggtgagggctagg

SEQ ID NO: 13520 - DNA, 20 bp, synthetic construct
  source 1..20: mol_type = other DNA
gctggtttaaaaccagcggc

SEQ ID NO: 13521 - DNA, 20 bp, synthetic construct
  source 1..20: mol_type = other DNA
cagaatcctcttccatgctc

SEQ ID NO: 13522 - DNA, 20 bp, synthetic construct
  source 1..20: mol_type = other DNA
gttttcagctcttctgaggc

SEQ ID NO: 13523 - DNA, 20 bp, synthetic construct
  source 1..20: mol_type = other DNA
ttgtctcttgcaagcactgg

SEQ ID NO: 13524 - DNA, 20 bp, synthetic construct
  source 1..20: mol_type = other DNA
agattctgctgctaagaacc

SEQ ID NO: 13525 - DNA, 20 bp, synthetic construct
  source 1..20: mol_type = other DNA
ctttattgatctcatagccc

SEQ ID NO: 13526 - DNA, 20 bp, synthetic construct
  source 1..20: mol_type = other DNA
gtcttcattcacccagtacc

SEQ ID NO: 13527 - DNA, 20 bp, synthetic construct
  source 1..20: mol_type = other DNA
cctgtgagttatccaccatt

SEQ ID NO: 13528 - DNA, 20 bp, synthetic construct
  source 1..20: mol_type = other DNA
gcaggtattgtagagtaagg

SEQ ID NO: 13529 - DNA, 20 bp, synthetic construct
  source 1..20: mol_type = other DNA
cttttgctcttaccgggctc

SEQ ID NO: 13530 - DNA, 20 bp, synthetic construct
  source 1..20: mol_type = other DNA
gagaaggagagcgcgttggg

SEQ ID NO: 13531 - DNA, 20 bp, synthetic construct
  source 1..20: mol_type = other DNA
cagtacattttcattgccca

SEQ ID NO: 13532 - DNA, 20 bp, synthetic construct
  source 1..20: mol_type = other DNA
cacataggagaatgtactgt

SEQ ID NO: 13533 - DNA, 20 bp, synthetic construct
  source 1..20: mol_type = other DNA
gagaccttggtgaatgtcag

SEQ ID NO: 13534 - DNA, 20 bp, synthetic construct
  source 1..20: mol_type = other DNA
tgggcctggttgaaaagcat

SEQ ID NO: 13535 - DNA, 20 bp, synthetic construct
  source 1..20: mol_type = other DNA
tttcattgcctggtagttca

SEQ ID NO: 13536 - DNA, 20 bp, synthetic construct
  source 1..20: mol_type = other DNA
tttatccacttagggatggt

SEQ ID NO: 13537 - DNA, 20 bp, synthetic construct
  source 1..20: mol_type = other DNA
cgagtggatgaggaatttct

SEQ ID NO: 13538 - DNA, 20 bp, synthetic construct
  source 1..20: mol_type = other DNA
ttggtttaatcccattgccc

SEQ ID NO: 13539 - DNA, 20 bp, synthetic construct
  source 1..20: mol_type = other DNA
gctggttgtccaaatcaaca

SEQ ID NO: 13540 - DNA, 20 bp, synthetic construct
  source 1..20: mol_type = other DNA
tcttcagggcattgttcttc

SEQ ID NO: 13541 - DNA, 20 bp, synthetic construct
  source 1..20: mol_type = other DNA
tcactgctgctttgaatggg

SEQ ID NO: 13542 - DNA, 20 bp, synthetic construct
  source 1..20: mol_type = other DNA
gatgttggcatcgttttcgg

SEQ ID NO: 13543 - DNA, 20 bp, synthetic construct
  source 1..20: mol_type = other DNA
tgtcaccatcgtgtccacag

SEQ ID NO: 13544 - DNA, 20 bp, synthetic construct
  source 1..20: mol_type = other DNA
gttattccgcaatgaatgtc

SEQ ID NO: 13545 - DNA, 20 bp, synthetic construct
  source 1..20: mol_type = other DNA
ccaaagcatctcagagaaaa

SEQ ID NO: 13546 - DNA, 20 bp, synthetic construct
  source 1..20: mol_type = other DNA
tgtgggtctgttactcggca

SEQ ID NO: 13547 - DNA, 20 bp, synthetic construct
  source 1..20: mol_type = other DNA
tcacaggagatggttgagga

SEQ ID NO: 13548 - DNA, 20 bp, synthetic construct
  source 1..20: mol_type = other DNA
cacagttagttctgccttcg

SEQ ID NO: 13549 - DNA, 20 bp, synthetic construct
  source 1..20: mol_type = other DNA
cccgccctgtgaaaagcaga

SEQ ID NO: 13550 - DNA, 20 bp, synthetic construct
  source 1..20: mol_type = other DNA
ccagtcggaaatccggtcct

SEQ ID NO: 13551 - DNA, 20 bp, synthetic construct
  source 1..20: mol_type = other DNA
gaagcagcaggtaaaagagg

SEQ ID NO: 13552 - DNA, 20 bp, synthetic construct
  source 1..20: mol_type = other DNA
gccatggtctgcacggtgta

SEQ ID NO: 13553 - DNA, 20 bp, synthetic construct
  source 1..20: mol_type = other DNA
tctccatccagcaaggtgag

SEQ ID NO: 13554 - DNA, 20 bp, synthetic construct
  source 1..20: mol_type = other DNA
gagtttcttctgtttctcca

SEQ ID NO: 13555 - DNA, 20 bp, synthetic construct
  source 1..20: mol_type = other DNA
cactcgagcagaacatttcc

SEQ ID NO: 13556 - DNA, 20 bp, synthetic construct
  source 1..20: mol_type = other DNA
actgcctcacactagtgagc

SEQ ID NO: 13557 - DNA, 20 bp, synthetic construct
  source 1..20: mol_type = other DNA
gtgtaccttaaaagtgtctc

SEQ ID NO: 13558 - DNA, 20 bp, synthetic construct
  source 1..20: mol_type = other DNA
cctatttccattgaccacaa

SEQ ID NO: 13559 - DNA, 20 bp, synthetic construct
  source 1..20: mol_type = other DNA
tattatttctcggacccgtg

SEQ ID NO: 13560 - DNA, 20 bp, synthetic construct
  source 1..20: mol_type = other DNA
tacaactggtggagaacggg

SEQ ID NO: 13561 - DNA, 20 bp, synthetic construct
  source 1..20: mol_type = other DNA
ccactacagccgtattctcc

SEQ ID NO: 13562 - DNA, 20 bp, synthetic construct
  source 1..20: mol_type = other DNA
ccaacatgttggtgtttgca

SEQ ID NO: 13563 - DNA, 20 bp, synthetic construct
  source 1..20: mol_type = other DNA
ctgcagctcatgttgatctt

SEQ ID NO: 13564 - DNA, 20 bp, synthetic construct
  source 1..20: mol_type = other DNA
gcactccattctccagagga

SEQ ID NO: 13565 - DNA, 20 bp, synthetic construct
  source 1..20: mol_type = other DNA
ctcattgtcaggatccacag

SEQ ID NO: 13566 - DNA, 20 bp, synthetic construct
  source 1..20: mol_type = other DNA
gtttctatggtaaccatcct

SEQ ID NO: 13567 - DNA, 20 bp, synthetic construct
  source 1..20: mol_type = other DNA
gaggtcacgctctgtacaac

SEQ ID NO: 13568 - DNA, 20 bp, synthetic construct
  source 1..20: mol_type = other DNA
gttggacattacctcgtggc

SEQ ID NO: 13569 - DNA, 20 bp, synthetic construct
  source 1..20: mol_type = other DNA
gttaggacggagcctgaatc

SEQ ID NO: 13570 - DNA, 20 bp, synthetic construct
  source 1..20: mol_type = other DNA
tcctttggaaagtggagcac

SEQ ID NO: 13571 - DNA, 20 bp, synthetic construct
  source 1..20: mol_type = other DNA
agtatagagagcgctttgaa

SEQ ID NO: 13572 - DNA, 20 bp, synthetic construct
  source 1..20: mol_type = other DNA
gcaagattaagcagcaggca

SEQ ID NO: 13573 - DNA, 20 bp, synthetic construct
  source 1..20: mol_type = other DNA
tcatgattgctttacatggg

SEQ ID NO: 13574 - DNA, 20 bp, synthetic construct
  source 1..20: mol_type = other DNA
gcggcagtccagacgaaggc

SEQ ID NO: 13575 - DNA, 20 bp, synthetic construct
  source 1..20: mol_type = other DNA
gcttcatatacgtgagacac

SEQ ID NO: 13576 - DNA, 20 bp, synthetic construct
  source 1..20: mol_type = other DNA
cctttcccatcttatctcca

SEQ ID NO: 13577 - DNA, 20 bp, synthetic construct
  source 1..20: mol_type = other DNA
caggtgcctccgttaaggca

SEQ ID NO: 13578 - DNA, 20 bp, synthetic construct
  source 1..20: mol_type = other DNA
tcaggcttggaaacatccac

SEQ ID NO: 13579 - DNA, 20 bp, synthetic construct
  source 1..20: mol_type = other DNA
tgcacctgtctccggtactc

SEQ ID NO: 13580 - DNA, 20 bp, synthetic construct
  source 1..20: mol_type = other DNA
cagtcagcttgaaattctgc

SEQ ID NO: 13581 - DNA, 20 bp, synthetic construct
  source 1..20: mol_type = other DNA
taaatggaatgaggtgacct

SEQ ID NO: 13582 - DNA, 20 bp, synthetic construct
  source 1..20: mol_type = other DNA
ctgcattccagagacaaagt

SEQ ID NO: 13583 - DNA, 20 bp, synthetic construct
  source 1..20: mol_type = other DNA
ggtggagaaagcttcataat

SEQ ID NO: 13584 - DNA, 20 bp, synthetic construct
  source 1..20: mol_type = other DNA
agctcagcaccatgttaaat

SEQ ID NO: 13585 - DNA, 20 bp, synthetic construct
  source 1..20: mol_type = other DNA
gttgggatctccacggtagt

SEQ ID NO: 13586 - DNA, 20 bp, synthetic construct
  source 1..20: mol_type = other DNA
aggacagagttagatgaagt

SEQ ID NO: 13587 - DNA, 20 bp, synthetic construct
  source 1..20: mol_type = other DNA
gagatcttcctattggtgaa

SEQ ID NO: 13588 - DNA, 20 bp, synthetic construct
  source 1..20: mol_type = other DNA
ggagcacttgccactggtgt

SEQ ID NO: 13589 - DNA, 20 bp, synthetic construct
  source 1..20: mol_type = other DNA
gcagaaacaggcaaatttgt

SEQ ID NO: 13590 - DNA, 20 bp, synthetic construct
  source 1..20: mol_type = other DNA
ccaatttgcttcacgtcaaa

SEQ ID NO: 13591 - DNA, 20 bp, synthetic construct
  source 1..20: mol_type = other DNA
tgcacattgcattcccaaag

SEQ ID NO: 13592 - DNA, 20 bp, synthetic construct
  source 1..20: mol_type = other DNA
tgtctttgccagcaatagat

SEQ ID NO: 13593 - DNA, 20 bp, synthetic construct
  source 1..20: mol_type = other DNA
tgctgactctgcatcctcat

SEQ ID NO: 13594 - DNA, 20 bp, synthetic construct
  source 1..20: mol_type = other DNA
tccttgaagagcttgaagag

SEQ ID NO: 13595 - DNA, 20 bp, synthetic construct
  source 1..20: mol_type = other DNA
atggagagcactgtggctag

SEQ ID NO: 13596 - DNA, 20 bp, synthetic construct
  source 1..20: mol_type = other DNA
acgcgctttagaaacggctc

SEQ ID NO: 13597 - DNA, 20 bp, synthetic construct
  source 1..20: mol_type = other DNA
gctggaccacatgcatctcg

SEQ ID NO: 13598 - DNA, 20 bp, synthetic construct
  source 1..20: mol_type = other DNA
cgtgtgaatggcactgccaa

SEQ ID NO: 13599 - DNA, 20 bp, synthetic construct
  source 1..20: mol_type = other DNA
cccggtattgaatttggtgg

SEQ ID NO: 13600 - DNA, 20 bp, synthetic construct
  source 1..20: mol_type = other DNA
cccaggccacctaggtccga

SEQ ID NO: 13601 - DNA, 20 bp, synthetic construct
  source 1..20: mol_type = other DNA
ctggccgagcagtgatctcc

SEQ ID NO: 13602 - DNA, 20 bp, synthetic construct
  source 1..20: mol_type = other DNA
atatcaccatgtttagtgcc

SEQ ID NO: 13603 - DNA, 20 bp, synthetic construct
  source 1..20: mol_type = other DNA
gaaacctaaagggactaaag

SEQ ID NO: 13604 - DNA, 20 bp, synthetic construct
  source 1..20: mol_type = other DNA
gtaagccctgggagtacact

SEQ ID NO: 13605 - DNA, 20 bp, synthetic construct
  source 1..20: mol_type = other DNA
cttgtccaaaacatcgtact

SEQ ID NO: 13606 - DNA, 20 bp, synthetic construct
  source 1..20: mol_type = other DNA
gcataataagatggctccca

SEQ ID NO: 13607 - DNA, 20 bp, synthetic construct
  source 1..20: mol_type = other DNA
caggtactttgtcttgctca

SEQ ID NO: 13608 - DNA, 20 bp, synthetic construct
  source 1..20: mol_type = other DNA
gtccctgccagtctcgaaaa

SEQ ID NO: 13609 - DNA, 20 bp, synthetic construct
  source 1..20: mol_type = other DNA
accaccagcacccaaaaggg

SEQ ID NO: 13610 - DNA, 20 bp, synthetic construct
  source 1..20: mol_type = other DNA
gctaacattgtatgtcgggc

SEQ ID NO: 13611 - DNA, 20 bp, synthetic construct
  source 1..20: mol_type = other DNA
gagtctcttaagcagatagg

SEQ ID NO: 13612 - DNA, 20 bp, synthetic construct
  source 1..20: mol_type = other DNA
cacaggtcagggttgtgttg

SEQ ID NO: 13613 - DNA, 20 bp, synthetic construct
  source 1..20: mol_type = other DNA
tcaggtttttggagtggccg

SEQ ID NO: 13614 - DNA, 20 bp, synthetic construct
  source 1..20: mol_type = other DNA
ttattgagctcttacactcc

SEQ ID NO: 13615 - DNA, 20 bp, synthetic construct
  source 1..20: mol_type = other DNA
tcagggtcttttgggaatag

SEQ ID NO: 13616 - DNA, 20 bp, synthetic construct
  source 1..20: mol_type = other DNA
agctgcggcgattcatcagg

SEQ ID NO: 13617 - DNA, 20 bp, synthetic construct
  source 1..20: mol_type = other DNA
tgtctgaaccttctctggtt

SEQ ID NO: 13618 - DNA, 20 bp, synthetic construct
  source 1..20: mol_type = other DNA
gcttataatcgattccagct

SEQ ID NO: 13619 - DNA, 20 bp, synthetic construct
  source 1..20: mol_type = other DNA
atctgtcccattacacctat

SEQ ID NO: 13620 - DNA, 20 bp, synthetic construct
  source 1..20: mol_type = other DNA
ctcaatggatgcagggtaag

SEQ ID NO: 13621 - DNA, 20 bp, synthetic construct
  source 1..20: mol_type = other DNA
gtgatgcagatgtccactat

SEQ ID NO: 13622 - DNA, 20 bp, synthetic construct
  source 1..20: mol_type = other DNA
ggacggcgatagaaaagtag

SEQ ID NO: 13623 - DNA, 20 bp, synthetic construct
  source 1..20: mol_type = other DNA
gtgacactgttcagagtttg

SEQ ID NO: 13624 - DNA, 20 bp, synthetic construct
  source 1..20: mol_type = other DNA
tggctataaatggagcttga

SEQ ID NO: 13625 - DNA, 20 bp, synthetic construct
  source 1..20: mol_type = other DNA
aggtgtctaggaattcgctt

SEQ ID NO: 13626 - DNA, 20 bp, synthetic construct
  source 1..20: mol_type = other DNA
ttggatttgcagtaggctga

SEQ ID NO: 13627 - DNA, 20 bp, synthetic construct
  source 1..20: mol_type = other DNA
aagccttcatgtgatgtaga

SEQ ID NO: 13628 - DNA, 20 bp, synthetic construct
  source 1..20: mol_type = other DNA
ctagcaccacgatgtctatt

SEQ ID NO: 13629 - DNA, 20 bp, synthetic construct
  source 1..20: mol_type = other DNA
tgctagtccggcacttggta

SEQ ID NO: 13630 - DNA, 20 bp, synthetic construct
  source 1..20: mol_type = other DNA
actccaaagaaggtctcatc

SEQ ID NO: 13631 - DNA, 20 bp, synthetic construct
  source 1..20: mol_type = other DNA
cagcgtcacctggatgtgta

SEQ ID NO: 13632 - DNA, 20 bp, synthetic construct
  source 1..20: mol_type = other DNA
catcacatggtcctctgtca

SEQ ID NO: 13633 - DNA, 20 bp, synthetic construct
  source 1..20: mol_type = other DNA
ctctgtccaagccggtttga

SEQ ID NO: 13634 - DNA, 20 bp, synthetic construct
  source 1..20: mol_type = other DNA
taggtgccgcaggactgctg

SEQ ID NO: 13635 - DNA, 20 bp, synthetic construct
  source 1..20: mol_type = other DNA
gcttagggtcaaaagtgaaa

SEQ ID NO: 13636 - DNA, 20 bp, synthetic construct
  source 1..20: mol_type = other DNA
agtgatatcaaagatggtcc

SEQ ID NO: 13637 - DNA, 20 bp, synthetic construct
  source 1..20: mol_type = other DNA
atggtcatattgctcgtaac

SEQ ID NO: 13638 - DNA, 20 bp, synthetic construct
  source 1..20: mol_type = other DNA
tcctggtcctgccaaaatac

SEQ ID NO: 13639 - DNA, 20 bp, synthetic construct
  source 1..20: mol_type = other DNA
catgatggagttgctcaggg

SEQ ID NO: 13640 - DNA, 20 bp, synthetic construct
  source 1..20: mol_type = other DNA
ggagagtcaccctccttttc

SEQ ID NO: 13641 - DNA, 20 bp, synthetic construct
  source 1..20: mol_type = other DNA
cacaaaggtatcagcctgtt

SEQ ID NO: 13642 - DNA, 20 bp, synthetic construct
  source 1..20: mol_type = other DNA
agccaatagggagcaatttt

SEQ ID NO: 13643 - DNA, 20 bp, synthetic construct
  source 1..20: mol_type = other DNA
gggctatcccactgaagaga

SEQ ID NO: 13644 - DNA, 20 bp, synthetic construct
  source 1..20: mol_type = other DNA
accttgtgtgaaagttacag

SEQ ID NO: 13645 - DNA, 20 bp, synthetic construct
  source 1..20: mol_type = other DNA
agggcactgcattgatagtc

SEQ ID NO: 13646 - DNA, 20 bp, synthetic construct
  source 1..20: mol_type = other DNA
tcttcaagacagtgttctgt

SEQ ID NO: 13647 - DNA, 20 bp, synthetic construct
  source 1..20: mol_type = other DNA
tcctgaagctttgaaatgtg

SEQ ID NO: 13648 - DNA, 20 bp, synthetic construct
  source 1..20: mol_type = other DNA
ggttcatgcccagatcgtat

SEQ ID NO: 13649 - DNA, 20 bp, synthetic construct
  source 1..20: mol_type = other DNA
cagcagccaaaaaagggaac

SEQ ID NO: 13650 - DNA, 20 bp, synthetic construct
  source 1..20: mol_type = other DNA
gcacagacgttggtgatgag

SEQ ID NO: 13651 - DNA, 20 bp, synthetic construct
  source 1..20: mol_type = other DNA
ctgagaaggtaaaagtctgg

SEQ ID NO: 13652 - DNA, 20 bp, synthetic construct
  source 1..20: mol_type = other DNA
cctcgcaggagagactgccg

SEQ ID NO: 13653 - DNA, 20 bp, synthetic construct
  source 1..20: mol_type = other DNA
ccagcagaatgccaaccacc

SEQ ID NO: 13654 - DNA, 20 bp, synthetic construct
  source 1..20: mol_type = other DNA
gtggttctgagaaaggtcga

SEQ ID NO: 13655 - DNA, 20 bp, synthetic construct
  source 1..20: mol_type = other DNA
gcatgatgtcgcggaagttg

SEQ ID NO: 13656 - DNA, 20 bp, synthetic construct
  source 1..20: mol_type = other DNA
gcacttggtattctgggtcc

SEQ ID NO: 13657 - DNA, 20 bp, synthetic construct
  source 1..20: mol_type = other DNA
ctcctgttgtaccaaccgta

SEQ ID NO: 13658 - DNA, 20 bp, synthetic construct
  source 1..20: mol_type = other DNA
ccttggccagtgaaaatcta

SEQ ID NO: 13659 - DNA, 20 bp, synthetic construct
  source 1..20: mol_type = other DNA
ctggaacggcatcaacttgg

SEQ ID NO: 13660 - DNA, 20 bp, synthetic construct
  source 1..20: mol_type = other DNA
cactaatgctgttgtcctga

SEQ ID NO: 13661 - DNA, 20 bp, synthetic construct
  source 1..20: mol_type = other DNA
gcaaacatgcgtgtgaacca

SEQ ID NO: 13662 - DNA, 20 bp, synthetic construct
  source 1..20: mol_type = other DNA
gagtgtggttgtggtggtct

SEQ ID NO: 13663 - DNA, 20 bp, synthetic construct
  source 1..20: mol_type = other DNA
agaaacaagaaaccctccga

SEQ ID NO: 13664 - DNA, 20 bp, synthetic construct
  source 1..20: mol_type = other DNA
agccgctgagatgcctttca

SEQ ID NO: 13665 - DNA, 20 bp, synthetic construct
  source 1..20: mol_type = other DNA
tgcggctaaaatcttgcttg

SEQ ID NO: 13666 - DNA, 20 bp, synthetic construct
  source 1..20: mol_type = other DNA
gtctctgtgtagtagctgtg

SEQ ID NO: 13667 - DNA, 20 bp, synthetic construct
  source 1..20: mol_type = other DNA
tccatgcagcaattgaagtt

SEQ ID NO: 13668 - DNA, 20 bp, synthetic construct
  source 1..20: mol_type = other DNA
cacgagggtctccgcattta

SEQ ID NO: 13669 - DNA, 20 bp, synthetic construct
  source 1..20: mol_type = other DNA
gacttctctcagagtatcgg

SEQ ID NO: 13670 - DNA, 20 bp, synthetic construct
  source 1..20: mol_type = other DNA
aatggcgtaagtcagattcg

SEQ ID NO: 13671 - DNA, 20 bp, synthetic construct
  source 1..20: mol_type = other DNA
cgactcttctcttgcagaaa

SEQ ID NO: 13672 - DNA, 20 bp, synthetic construct
  source 1..20: mol_type = other DNA
gttttcgacttaggacagta

SEQ ID NO: 13673 - DNA, 20 bp, synthetic construct
  source 1..20: mol_type = other DNA
ggtgataaaagggtcgccgt

SEQ ID NO: 13674 - DNA, 20 bp, synthetic construct
  source 1..20: mol_type = other DNA
cctagtgtatataaaagccc

SEQ ID NO: 13675 - DNA, 20 bp, synthetic construct
  source 1..20: mol_type = other DNA
cagggcagataggcattctg

SEQ ID NO: 13676 - DNA, 20 bp, synthetic construct
  source 1..20: mol_type = other DNA
ttgcagaaacaaagtcaggg

SEQ ID NO: 13677 - DNA, 20 bp, synthetic construct
  source 1..20: mol_type = other DNA
ccagctagatgttagagtac

SEQ ID NO: 13678 - DNA, 20 bp, synthetic construct
  source 1..20: mol_type = other DNA
ccttctttgccatatccaca

SEQ ID NO: 13679 - DNA, 20 bp, synthetic construct
  source 1..20: mol_type = other DNA
cgagtgatccctgacaggtg

SEQ ID NO: 13680 - DNA, 20 bp, synthetic construct
  source 1..20: mol_type = other DNA
acagcgcctttagcaaagtg

SEQ ID NO: 13681 - DNA, 20 bp, synthetic construct
  source 1..20: mol_type = other DNA
gttttccatagcgtgtgcca

SEQ ID NO: 13682 - DNA, 20 bp, synthetic construct
  source 1..20: mol_type = other DNA
caacccatgggatcttgctt

SEQ ID NO: 13683 - DNA, 20 bp, synthetic construct
  source 1..20: mol_type = other DNA
ttccttgatggtctccacac

SEQ ID NO: 13684 - DNA, 20 bp, synthetic construct
  source 1..20: mol_type = other DNA
acggacgttgggtggtaccc

SEQ ID NO: 13685 - DNA, 20 bp, synthetic construct
  source 1..20: mol_type = other DNA
gttcttgtatttccaggaga

SEQ ID NO: 13686 - DNA, 20 bp, synthetic construct
  source 1..20: mol_type = other DNA
cttttctttgttgccgttgg

SEQ ID NO: 13687 - DNA, 20 bp, synthetic construct
  source 1..20: mol_type = other DNA
ggacactgggtagcttcttt

SEQ ID NO: 13688 - DNA, 20 bp, synthetic construct
  source 1..20: mol_type = other DNA
ctgtggtacaggtccaaggt

SEQ ID NO: 13689 - DNA, 20 bp, synthetic construct
  source 1..20: mol_type = other DNA
gacaaggcttggcaacccag

SEQ ID NO: 13690 - DNA, 20 bp, synthetic construct
  source 1..20: mol_type = other DNA
gctgctgcaactagcttaag

SEQ ID NO: 13691 - DNA, 20 bp, synthetic construct
  source 1..20: mol_type = other DNA
ttgggctgaacttttctcat

SEQ ID NO: 13692 - DNA, 20 bp, synthetic construct
  source 1..20: mol_type = other DNA
caaggtgaggtggatcggtt

SEQ ID NO: 13693 - DNA, 20 bp, synthetic construct
  source 1..20: mol_type = other DNA
acacaaattgcatggtgaag

SEQ ID NO: 13694 - DNA, 20 bp, synthetic construct
  source 1..20: mol_type = other DNA
tttgaatgtggcgtgtggga

SEQ ID NO: 13695 - DNA, 20 bp, synthetic construct
  source 1..20: mol_type = other DNA
tgtaaatatggacgtctcca

SEQ ID NO: 13696 - DNA, 20 bp, synthetic construct
  source 1..20: mol_type = other DNA
cagacacaggagatgttggc

SEQ ID NO: 13697 - DNA, 20 bp, synthetic construct
  source 1..20: mol_type = other DNA
ctctttcttgcaaagaaggg

SEQ ID NO: 13698 - DNA, 20 bp, synthetic construct
  source 1..20: mol_type = other DNA
tccatctttttcagccatct

SEQ ID NO: 13699 - DNA, 20 bp, synthetic construct
  source 1..20: mol_type = other DNA
tggtctcatgcaaatgggct

SEQ ID NO: 13700 - DNA, 20 bp, synthetic construct
  source 1..20: mol_type = other DNA
tcatacattgctgccggttg

SEQ ID NO: 13701 - DNA, 20 bp, synthetic construct
  source 1..20: mol_type = other DNA
tagtttcctgaaattcaggc

SEQ ID NO: 13702 - DNA, 20 bp, synthetic construct
  source 1..20: mol_type = other DNA
aggttcattgagtaggtacc

SEQ ID NO: 13703 - DNA, 20 bp, synthetic construct
  source 1..20: mol_type = other DNA
gggaagaaggcagaggttgc

SEQ ID NO: 13704 - DNA, 20 bp, synthetic construct
  source 1..20: mol_type = other DNA
cttgatgtaccagtcaaacg

SEQ ID NO: 13705 - DNA, 20 bp, synthetic construct
  source 1..20: mol_type = other DNA
catcattcatgtctgaatcc

SEQ ID NO: 13706 - DNA, 20 bp, synthetic construct
  source 1..20: mol_type = other DNA
acgggattcttctgaatgtg

SEQ ID NO: 13707 - DNA, 20 bp, synthetic construct
  source 1..20: mol_type = other DNA
gacttgagcttctccttctc

SEQ ID NO: 13708 - DNA, 20 bp, synthetic construct
  source 1..20: mol_type = other DNA
ccctcgggtgcatccaggtt

SEQ ID NO: 13709 - DNA, 20 bp, synthetic construct
  source 1..20: mol_type = other DNA
gtcagacaaatggtacacaa

SEQ ID NO: 13710 - DNA, 20 bp, synthetic construct
  source 1..20: mol_type = other DNA
tgagcatctttacagcgaca

SEQ ID NO: 13711 - DNA, 20 bp, synthetic construct
  source 1..20: mol_type = other DNA
gttttctcttttccacgttg

SEQ ID NO: 13712 - DNA, 20 bp, synthetic construct
  source 1..20: mol_type = other DNA
acccagtaacaaccaagaca

SEQ ID NO: 13713 - DNA, 20 bp, synthetic construct
  source 1..20: mol_type = other DNA
gtatgtgcagctacaagtac

SEQ ID NO: 13714 - DNA, 20 bp, synthetic construct
  source 1..20: mol_type = other DNA
caggcggtgtgctcctcact

SEQ ID NO: 13715 - DNA, 20 bp, synthetic construct
  source 1..20: mol_type = other DNA
cttcagtaaagaagtgccaa

SEQ ID NO: 13716 - DNA, 20 bp, synthetic construct
  source 1..20: mol_type = other DNA
cttcttgtgccattattcac

SEQ ID NO: 13717 - DNA, 20 bp, synthetic construct
  source 1..20: mol_type = other DNA
tacattcatcagggatgaca

SEQ ID NO: 13718 - DNA, 20 bp, synthetic construct
  source 1..20: mol_type = other DNA
atacatgatggagacgttga

SEQ ID NO: 13719 - DNA, 20 bp, synthetic construct
  source 1..20: mol_type = other DNA
ccaccctggaacctgctcca

SEQ ID NO: 13720 - DNA, 20 bp, synthetic construct
  source 1..20: mol_type = other DNA
cacgcaaatgcattactgta

SEQ ID NO: 13721 - DNA, 20 bp, synthetic construct
  source 1..20: mol_type = other DNA
tgttccagttgacaaaggag

SEQ ID NO: 13722 - DNA, 20 bp, synthetic construct
  source 1..20: mol_type = other DNA
agaagaagcgtgacaacaca

SEQ ID NO: 13723 - DNA, 20 bp, synthetic construct
  source 1..20: mol_type = other DNA
gccgaggtcctgaacacaaa

SEQ ID NO: 13724 - DNA, 20 bp, synthetic construct
  source 1..20: mol_type = other DNA
cagccaccacgtagacctca

SEQ ID NO: 13725 - DNA, 20 bp, synthetic construct
  source 1..20: mol_type = other DNA
ttgttgcagtgtctagacgg

SEQ ID NO: 13726 - DNA, 20 bp, synthetic construct
  source 1..20: mol_type = other DNA
aggcctttggaatacaacgc

SEQ ID NO: 13727 - DNA, 20 bp, synthetic construct
  source 1..20: mol_type = other DNA
gtaagttccctcacgtgagt

SEQ ID NO: 13728 - DNA, 20 bp, synthetic construct
  source 1..20: mol_type = other DNA
attgctgccatgctctatta

SEQ ID NO: 13729 - DNA, 20 bp, synthetic construct
  source 1..20: mol_type = other DNA
cacgacaccaaccaccaggg

SEQ ID NO: 13730 - DNA, 20 bp, synthetic construct
  source 1..20: mol_type = other DNA
gtggatccgacagttaagat

SEQ ID NO: 13731 - DNA, 20 bp, synthetic construct
  source 1..20: mol_type = other DNA
aaggctcttcatgaggctta

SEQ ID NO: 13732 - DNA, 20 bp, synthetic construct
  source 1..20: mol_type = other DNA
ttggcgttcttaggaactgt

SEQ ID NO: 13733 - DNA, 20 bp, synthetic construct
  source 1..20: mol_type = other DNA
agtgtgctggattcacatag

SEQ ID NO: 13734 - DNA, 20 bp, synthetic construct
  source 1..20: mol_type = other DNA
cggagggcttaggcagtttg

SEQ ID NO: 13735 - DNA, 20 bp, synthetic construct
  source 1..20: mol_type = other DNA
ccgaacagcaggtcgttaat

SEQ ID NO: 13736 - DNA, 20 bp, synthetic construct
  source 1..20: mol_type = other DNA
tagaatcctgtccgggtaca

SEQ ID NO: 13737 - DNA, 20 bp, synthetic construct
  source 1..20: mol_type = other DNA
tccagctgcgacattttgca

SEQ ID NO: 13738 - DNA, 20 bp, synthetic construct
  source 1..20: mol_type = other DNA
cccaattaactcagttcctt

SEQ ID NO: 13739 - DNA, 20 bp, synthetic construct
  source 1..20: mol_type = other DNA
cagagtcttctccagatact

SEQ ID NO: 13740 - DNA, 20 bp, synthetic construct
  source 1..20: mol_type = other DNA
gtgacacttcacccacatac

SEQ ID NO: 13741 - DNA, 20 bp, synthetic construct
  source 1..20: mol_type = other DNA
tgagtaacagctgttcttgt

SEQ ID NO: 13742 - DNA, 20 bp, synthetic construct
  source 1..20: mol_type = other DNA
cttcagacagctgtaaatga

SEQ ID NO: 13743 - DNA, 20 bp, synthetic construct
  source 1..20: mol_type = other DNA
gggaatgtcaggatataggt

SEQ ID NO: 13744 - DNA, 20 bp, synthetic construct
  source 1..20: mol_type = other DNA
gcctttattgtagggttcta

SEQ ID NO: 13745 - DNA, 20 bp, synthetic construct
  source 1..20: mol_type = other DNA
agagatgaaactatgggccc

SEQ ID NO: 13746 - DNA, 20 bp, synthetic construct
  source 1..20: mol_type = other DNA
acctggctggactttgccag

SEQ ID NO: 13747 - DNA, 20 bp, synthetic construct
  source 1..20: mol_type = other DNA
ttccacactgcacccacttg

SEQ ID NO: 13748 - DNA, 20 bp, synthetic construct
  source 1..20: mol_type = other DNA
cgcagcaccaggtaaacgac

SEQ ID NO: 13749 - DNA, 20 bp, synthetic construct
  source 1..20: mol_type = other DNA
tgaggatcggtatcgtccat

SEQ ID NO: 13750 - DNA, 20 bp, synthetic construct
  source 1..20: mol_type = other DNA
gtgggtgtgcaacatgaaat

SEQ ID NO: 13751 - DNA, 20 bp, synthetic construct
  source 1..20: mol_type = other DNA
tgctgctccacttttaactt

SEQ ID NO: 13752 - DNA, 20 bp, synthetic construct
  source 1..20: mol_type = other DNA
gtcgcggccatggctccaag

SEQ ID NO: 13753 - DNA, 20 bp, synthetic construct
  source 1..20: mol_type = other DNA
cccatgaaagaaaatcagtc

SEQ ID NO: 13754 - DNA, 20 bp, synthetic construct
  source 1..20: mol_type = other DNA
agtaagcaagtcctcaaatg

SEQ ID NO: 13755 - DNA, 20 bp, synthetic construct
  source 1..20: mol_type = other DNA
tcagtggccgccttgattca

SEQ ID NO: 13756 - DNA, 20 bp, synthetic construct
  source 1..20: mol_type = other DNA
ccagccattttcaagacttc

SEQ ID NO: 13757 - DNA, 20 bp, synthetic construct
  source 1..20: mol_type = other DNA
ggcttaggctctgatatgcc

SEQ ID NO: 13758 - DNA, 20 bp, synthetic construct
  source 1..20: mol_type = other DNA
aggtccagagaatcgcattc

SEQ ID NO: 13759 - DNA, 20 bp, synthetic construct
  source 1..20: mol_type = other DNA
gaaaccaaggaagtttctac

SEQ ID NO: 13760 - DNA, 20 bp, synthetic construct
  source 1..20: mol_type = other DNA
cggcttggagctgaccacgt

SEQ ID NO: 13761 - DNA, 20 bp, synthetic construct
  source 1..20: mol_type = other DNA
gagaaactatttggaggaca

SEQ ID NO: 13762 - DNA, 20 bp, synthetic construct
  source 1..20: mol_type = other DNA
tggcacaggtatgatactag

SEQ ID NO: 13763 - DNA, 20 bp, synthetic construct
  source 1..20: mol_type = other DNA
ctgtttcttctggaccctga

SEQ ID NO: 13764 - DNA, 20 bp, synthetic construct
  source 1..20: mol_type = other DNA
gatgtgggcacttgctccat

SEQ ID NO: 13765 - DNA, 20 bp, synthetic construct
  source 1..20: mol_type = other DNA
aggctggacgttattccgac

SEQ ID NO: 13766 - DNA, 20 bp, synthetic construct
  source 1..20: mol_type = other DNA
gtggagccgtgggtcagtat

SEQ ID NO: 13767 - DNA, 20 bp, synthetic construct
  source 1..20: mol_type = other DNA
aacatctggagagaggaagg

SEQ ID NO: 13768 - DNA, 20 bp, synthetic construct
  source 1..20: mol_type = other DNA
tcaactgggcctttcggatg

SEQ ID NO: 13769 - DNA, 20 bp, synthetic construct
  source 1..20: mol_type = other DNA
gctgtgcacaggtaagagtg

SEQ ID NO: 13770 - DNA, 20 bp, synthetic construct
  source 1..20: mol_type = other DNA
ccagaagttggacgaaaagt

SEQ ID NO: 13771 - DNA, 20 bp, synthetic construct
  source 1..20: mol_type = other DNA
ttccaacaatgtgtctcttc

SEQ ID NO: 13772 - DNA, 20 bp, synthetic construct
  source 1..20: mol_type = other DNA
tggctgctcgtctcaaagta

SEQ ID NO: 13773 - DNA, 20 bp, synthetic construct
  source 1..20: mol_type = other DNA
cagctactagcatgaggaga

SEQ ID NO: 13774 - DNA, 20 bp, synthetic construct
  source 1..20: mol_type = other DNA
ggacacattgtactccaccg

SEQ ID NO: 13775 - DNA, 20 bp, synthetic construct
  source 1..20: mol_type = other DNA
gtgcttggagatctcgaagg

SEQ ID NO: 13776 - DNA, 20 bp, synthetic construct
  source 1..20: mol_type = other DNA
ccattgtgacttatgttggt

SEQ ID NO: 13777 - DNA, 20 bp, synthetic construct
  source 1..20: mol_type = other DNA
gatgtcacagatgcattcag

SEQ ID NO: 13778 - DNA, 20 bp, synthetic construct
  source 1..20: mol_type = other DNA
cttgagtgatggtgatgttc

SEQ ID NO: 13779 - DNA, 20 bp, synthetic construct
  source 1..20: mol_type = other DNA
tgttgcgcttaaagcttaca

SEQ ID NO: 13780 - DNA, 20 bp, synthetic construct
  source 1..20: mol_type = other DNA
taggtcaccacggttttcga

SEQ ID NO: 13781 - DNA, 20 bp, synthetic construct
  source 1..20: mol_type = other DNA
cgtcgctgcctaccatcgct

SEQ ID NO: 13782 - DNA, 20 bp, synthetic construct
  source 1..20: mol_type = other DNA
tggtccttgaacagcgctct

SEQ ID NO: 13783 - DNA, 20 bp, synthetic construct
  source 1..20: mol_type = other DNA
tcccgcggctttgtcttggc

SEQ ID NO: 13784 - DNA, 20 bp, synthetic construct
  source 1..20: mol_type = other DNA
gctttcgcaagaacacgggc

SEQ ID NO: 13785 - DNA, 20 bp, synthetic construct
  source 1..20: mol_type = other DNA
ggctggcattttgagacata

SEQ ID NO: 13786 - DNA, 20 bp, synthetic construct
  source 1..20: mol_type = other DNA
agagagggaagatcttgatt

SEQ ID NO: 13787 - DNA, 20 bp, synthetic construct
  source 1..20: mol_type = other DNA
cagctgccgacattgttcaa

SEQ ID NO: 13788 - DNA, 20 bp, synthetic construct
  source 1..20: mol_type = other DNA
caggcttcgcaagagcacat

SEQ ID NO: 13789 - DNA, 20 bp, synthetic construct
  source 1..20: mol_type = other DNA
tgtaataacagttgccgtcc

SEQ ID NO: 13790 - DNA, 20 bp, synthetic construct
  source 1..20: mol_type = other DNA
tctgcgttttgtcgaagacc

SEQ ID NO: 13791 - DNA, 20 bp, synthetic construct
  source 1..20: mol_type = other DNA
atgtcacaactgggaaagaa

SEQ ID NO: 13792 - DNA, 20 bp, synthetic construct
  source 1..20: mol_type = other DNA
tttcccatacaggtggtaaa

SEQ ID NO: 13793 - DNA, 20 bp, synthetic construct
  source 1..20: mol_type = other DNA
gagtcagaaagataaggcag

SEQ ID NO: 13794 - DNA, 20 bp, synthetic construct
  source 1..20: mol_type = other DNA
gcagaaagattccttagtac

SEQ ID NO: 13795 - DNA, 20 bp, synthetic construct
  source 1..20: mol_type = other DNA
tgtcacagttgttacttggg

SEQ ID NO: 13796 - DNA, 20 bp, synthetic construct
  source 1..20: mol_type = other DNA
gacacatagatgcttttgac

SEQ ID NO: 13797 - DNA, 20 bp, synthetic construct
  source 1..20: mol_type = other DNA
acatctacacctcaagcttg

SEQ ID NO: 13798 - DNA, 20 bp, synthetic construct
  source 1..20: mol_type = other DNA
gtgtatatagggtgctgtga

SEQ ID NO: 13799 - DNA, 20 bp, synthetic construct
  source 1..20: mol_type = other DNA
attgtaggtggatagtccct

SEQ ID NO: 13800 - DNA, 20 bp, synthetic construct
  source 1..20: mol_type = other DNA
agttccaagtcactcctgta

SEQ ID NO: 13801 - DNA, 20 bp, synthetic construct
  source 1..20: mol_type = other DNA
tcagaccaggatgaatcccg

SEQ ID NO: 13802 - DNA, 20 bp, synthetic construct
  source 1..20: mol_type = other DNA
caggcctgaggtgaccgact

SEQ ID NO: 13803 - DNA, 20 bp, synthetic construct
  source 1..20: mol_type = other DNA
gtttcttctggtaacccatg

SEQ ID NO: 13804 - DNA, 20 bp, synthetic construct
  source 1..20: mol_type = other DNA
gatatatctgtcatctgcct

SEQ ID NO: 13805 - DNA, 20 bp, synthetic construct
  source 1..20: mol_type = other DNA
aagatgacgtaaatgaccca

SEQ ID NO: 13806 - DNA, 20 bp, synthetic construct
  source 1..20: mol_type = other DNA
cttgcaggtattgtccacgg

SEQ ID NO: 13807 - DNA, 20 bp, synthetic construct
  source 1..20: mol_type = other DNA
ggccaaacacccattcatgg

SEQ ID NO: 13808 - DNA, 20 bp, synthetic construct
  source 1..20: mol_type = other DNA
ctgtgatccacagaaaagta

SEQ ID NO: 13809 - DNA, 20 bp, synthetic construct
  source 1..20: mol_type = other DNA
gcccttcgcacttcttacac

SEQ ID NO: 13810 - DNA, 20 bp, synthetic construct
  source 1..20: mol_type = other DNA
gggagcgtaatcccaaggat

SEQ ID NO: 13811 - DNA, 20 bp, synthetic construct
  source 1..20: mol_type = other DNA
acctattggtaggccaatct

SEQ ID NO: 13812 - DNA, 20 bp, synthetic construct
  source 1..20: mol_type = other DNA
cctcgtcaatgaatactttg

SEQ ID NO: 13813 - DNA, 20 bp, synthetic construct
  source 1..20: mol_type = other DNA
cagtccttccacacgaccat

SEQ ID NO: 13814 - DNA, 20 bp, synthetic construct
  source 1..20: mol_type = other DNA
tacacgatccaagttaccag

SEQ ID NO: 13815 - DNA, 20 bp, synthetic construct
  source 1..20: mol_type = other DNA
ctcattgcgattgtggccct

SEQ ID NO: 13816 - DNA, 20 bp, synthetic construct
  source 1..20: mol_type = other DNA
acaactcgggatacaaattg

SEQ ID NO: 13817 - DNA, 20 bp, synthetic construct
  source 1..20: mol_type = other DNA
ttagcggcggattacccggc

SEQ ID NO: 13818 - DNA, 20 bp, synthetic construct
  source 1..20: mol_type = other DNA
cagccaagatgatagatacc

SEQ ID NO: 13819 - DNA, 20 bp, synthetic construct
  source 1..20: mol_type = other DNA
cacaaagcagtttacggcca

SEQ ID NO: 13820 - DNA, 20 bp, synthetic construct
  source 1..20: mol_type = other DNA
ttgagcactctgtagggtcg

SEQ ID NO: 13821 - DNA, 20 bp, synthetic construct
  source 1..20: mol_type = other DNA
gctgttttgcaggacctacg

SEQ ID NO: 13822 - DNA, 20 bp, synthetic construct
  source 1..20: mol_type = other DNA
agaactaggatttgcttcca

SEQ ID NO: 13823 - DNA, 20 bp, synthetic construct
  source 1..20: mol_type = other DNA
tgaggccaccagaaaataaa

SEQ ID NO: 13824 - DNA, 20 bp, synthetic construct
  source 1..20: mol_type = other DNA
cataacacagtttctccttg

SEQ ID NO: 13825 - DNA, 20 bp, synthetic construct
  source 1..20: mol_type = other DNA
cctgtgccttataggattga

SEQ ID NO: 13826 - DNA, 20 bp, synthetic construct
  source 1..20: mol_type = other DNA
acaaaggaataaccctgccc

SEQ ID NO: 13827 - DNA, 20 bp, synthetic construct
  source 1..20: mol_type = other DNA
ggtgtgtcctgatttgaata

SEQ ID NO: 13828 - DNA, 20 bp, synthetic construct
  source 1..20: mol_type = other DNA
ctgattagtcagttgcgaaa

SEQ ID NO: 13829 - DNA, 20 bp, synthetic construct
  source 1..20: mol_type = other DNA
ttggtcatggatgtttgctc

SEQ ID NO: 13830 - DNA, 20 bp, synthetic construct
  source 1..20: mol_type = other DNA
tgtatgtgcagttaggcact

SEQ ID NO: 13831 - DNA, 20 bp, synthetic construct
  source 1..20: mol_type = other DNA
aagcccagggcagaaccgat

SEQ ID NO: 13832 - DNA, 20 bp, synthetic construct
  source 1..20: mol_type = other DNA
tgtccctctgcttctaaata

SEQ ID NO: 13833 - DNA, 20 bp, synthetic construct
  source 1..20: mol_type = other DNA
tttttctcgatgttctggcg

SEQ ID NO: 13834 - DNA, 20 bp, synthetic construct
  source 1..20: mol_type = other DNA
gtccgtgacaggtcgctttc

SEQ ID NO: 13835 - DNA, 20 bp, synthetic construct
  source 1..20: mol_type = other DNA
gttcaggaggtgaattagtg

SEQ ID NO: 13836 - DNA, 20 bp, synthetic construct
  source 1..20: mol_type = other DNA
gtccacaaagctgaacatgt

SEQ ID NO: 13837 - DNA, 20 bp, synthetic construct
  source 1..20: mol_type = other DNA
gtccaagacgatgttaatga

SEQ ID NO: 13838 - DNA, 20 bp, synthetic construct
  source 1..20: mol_type = other DNA
aggccctgattacccagaat

SEQ ID NO: 13839 - DNA, 20 bp, synthetic construct
  source 1..20: mol_type = other DNA
ctggcctcactggcaaatcg

SEQ ID NO: 13840 - DNA, 20 bp, synthetic construct
  source 1..20: mol_type = other DNA
catatggaggtgggcagtaa

SEQ ID NO: 13841 - DNA, 20 bp, synthetic construct
  source 1..20: mol_type = other DNA
ccgaggtgccaaattcaaag

SEQ ID NO: 13842 - DNA, 20 bp, synthetic construct
  source 1..20: mol_type = other DNA
tagtcatgatactgctggta

SEQ ID NO: 13843 - DNA, 20 bp, synthetic construct
  source 1..20: mol_type = other DNA
atgccatccatgcctgagac

SEQ ID NO: 13844 - DNA, 20 bp, synthetic construct
  source 1..20: mol_type = other DNA
cccagaaccgtccttcagat

SEQ ID NO: 13845 - DNA, 20 bp, synthetic construct
  source 1..20: mol_type = other DNA
cagacaagtgcatagtactt

SEQ ID NO: 13846 - DNA, 20 bp, synthetic construct
  source 1..20: mol_type = other DNA
acactggtagccaaccatga

SEQ ID NO: 13847 - DNA, 20 bp, synthetic construct
  source 1..20: mol_type = other DNA
gcggcagttgaaggaaccaa

SEQ ID NO: 13848 - DNA, 20 bp, synthetic construct
  source 1..20: mol_type = other DNA
tccaagttttgacaggtacc

SEQ ID NO: 13849 - DNA, 20 bp, synthetic construct
  source 1..20: mol_type = other DNA
cggaacttgacggtgttccc

SEQ ID NO: 13850 - DNA, 20 bp, synthetic construct
  source 1..20: mol_type = other DNA
ccagtttgaagctactatca

SEQ ID NO: 13851 - DNA, 20 bp, synthetic construct
  source 1..20: mol_type = other DNA
tgcactctgtagtctggagc

SEQ ID NO: 13852 - DNA, 20 bp, synthetic construct
  source 1..20: mol_type = other DNA
gggtgctctggaaagttcgc

SEQ ID NO: 13853 - DNA, 20 bp, synthetic construct
  source 1..20: mol_type = other DNA
gaaggccctcgcgttctgcg

SEQ ID NO: 13854 - DNA, 20 bp, synthetic construct
  source 1..20: mol_type = other DNA
aaggtcctttccaacaaaga

SEQ ID NO: 13855 - DNA, 20 bp, synthetic construct
  source 1..20: mol_type = other DNA
acacctactgaaaataacgg

SEQ ID NO: 13856 - DNA, 20 bp, synthetic construct
  source 1..20: mol_type = other DNA
ctcacaggccggctctttcg

SEQ ID NO: 13857 - DNA, 20 bp, synthetic construct
  source 1..20: mol_type = other DNA
tctttttgtatgctgagcct

SEQ ID NO: 13858 - DNA, 20 bp, synthetic construct
  source 1..20: mol_type = other DNA
caccttcctaccaacgtccg

SEQ ID NO: 13859 - DNA, 20 bp, synthetic construct
  source 1..20: mol_type = other DNA
tgtatttcttcagttctggc

SEQ ID NO: 13860 - DNA, 20 bp, synthetic construct
  source 1..20: mol_type = other DNA
catgaaggttttgctgctgt

SEQ ID NO: 13861 - DNA, 20 bp, synthetic construct
  source 1..20: mol_type = other DNA
atgaagagatgaatggagcg

SEQ ID NO: 13862 - DNA, 20 bp, synthetic construct
  source 1..20: mol_type = other DNA
aggcgcgcacagacagaaga

SEQ ID NO: 13863 - DNA, 20 bp, synthetic construct
  source 1..20: mol_type = other DNA
tacatatccggtggaagact

SEQ ID NO: 13864 - DNA, 20 bp, synthetic construct
  source 1..20: mol_type = other DNA
cttggctgatttccatgcaa

SEQ ID NO: 13865 - DNA, 20 bp, synthetic construct
  source 1..20: mol_type = other DNA
tatgggatctttggtggtga

SEQ ID NO: 13866 - DNA, 20 bp, synthetic construct
  source 1..20: mol_type = other DNA
ctgtttcaacttggtccttg

SEQ ID NO: 13867 - DNA, 20 bp, synthetic construct
  source 1..20: mol_type = other DNA
ctctgaggacgactcgctct

SEQ ID NO: 13868 - DNA, 20 bp, synthetic construct
  source 1..20: mol_type = other DNA
cacggtaactgaagatgctt

SEQ ID NO: 13869 - DNA, 20 bp, synthetic construct
  source 1..20: mol_type = other DNA
ggagaaaattcacatgaggg

SEQ ID NO: 13870 - DNA, 20 bp, synthetic construct
  source 1..20: mol_type = other DNA
tgtgttcttgagctgctttt

SEQ ID NO: 13871 - DNA, 20 bp, synthetic construct
  source 1..20: mol_type = other DNA
ggcttggatgccatcaatgt

SEQ ID NO: 13872 - DNA, 20 bp, synthetic construct
  source 1..20: mol_type = other DNA
ggacataagtgacctggttg

SEQ ID NO: 13873 - DNA, 20 bp, synthetic construct
  source 1..20: mol_type = other DNA
ctgaggacaggatccaccgg

SEQ ID NO: 13874 - DNA, 20 bp, synthetic construct
  source 1..20: mol_type = other DNA
ttcaacgctcactgcaaaca

SEQ ID NO: 13875 - DNA, 20 bp, synthetic construct
  source 1..20: mol_type = other DNA
cactcagccttggcaagtag

SEQ ID NO: 13876 - DNA, 20 bp, synthetic construct
  source 1..20: mol_type = other DNA
ctcggcctcgttaagcatcc

SEQ ID NO: 13877 - DNA, 20 bp, synthetic construct
  source 1..20: mol_type = other DNA
ccagtttatcataagcggcc

SEQ ID NO: 13878 - DNA, 20 bp, synthetic construct
  source 1..20: mol_type = other DNA
agcctgaagaactgtccact

SEQ ID NO: 13879 - DNA, 20 bp, synthetic construct
  source 1..20: mol_type = other DNA
gtactgggtcggtcattagg

SEQ ID NO: 13880 - DNA, 20 bp, synthetic construct
  source 1..20: mol_type = other DNA
ctcacttccaagaccgtcac

SEQ ID NO: 13881 - DNA, 20 bp, synthetic construct
  source 1..20: mol_type = other DNA
aaagatgaatagttcctcgg

SEQ ID NO: 13882 - DNA, 20 bp, synthetic construct
  source 1..20: mol_type = other DNA
tggcacaaagatgtagagcc

SEQ ID NO: 13883 - DNA, 20 bp, synthetic construct
  source 1..20: mol_type = other DNA
ggtgcagtggagtatgtata

SEQ ID NO: 13884 - DNA, 20 bp, synthetic construct
  source 1..20: mol_type = other DNA
aatgatcctagcttgacatc

SEQ ID NO: 13885 - DNA, 20 bp, synthetic construct
  source 1..20: mol_type = other DNA
ggaagtaacgcagatccgaa

SEQ ID NO: 13886 - DNA, 20 bp, synthetic construct
  source 1..20: mol_type = other DNA
cgcaggtgggcaagcgagtt

SEQ ID NO: 13887 - DNA, 20 bp, synthetic construct
  source 1..20: mol_type = other DNA
tgttcctgtatcaagcactg

SEQ ID NO: 13888 - DNA, 20 bp, synthetic construct
  source 1..20: mol_type = other DNA
caccacgttgtcagtaacgc

SEQ ID NO: 13889 - DNA, 20 bp, synthetic construct
  source 1..20: mol_type = other DNA
agcttgtgtaaacacaagcg

SEQ ID NO: 13890 - DNA, 20 bp, synthetic construct
  source 1..20: mol_type = other DNA
gaattaatttaaggaggcgc

SEQ ID NO: 13891 - DNA, 20 bp, synthetic construct
  source 1..20: mol_type = other DNA
cgctctgtgctgaagaccac

SEQ ID NO: 13892 - DNA, 20 bp, synthetic construct
  source 1..20: mol_type = other DNA
gacgcaggaaagttggctcg

SEQ ID NO: 13893 - DNA, 20 bp, synthetic construct
  source 1..20: mol_type = other DNA
cattgtacggaatgacaagg

SEQ ID NO: 13894 - DNA, 20 bp, synthetic construct
  source 1..20: mol_type = other DNA
gtcgttgttgttgccgtggc

SEQ ID NO: 13895 - DNA, 20 bp, synthetic construct
  source 1..20: mol_type = other DNA
cttcctttgcactgtacact

SEQ ID NO: 13896 - DNA, 20 bp, synthetic construct
  source 1..20: mol_type = other DNA
gcaggtagcatgttgtgcgg

SEQ ID NO: 13897 - DNA, 20 bp, synthetic construct
  source 1..20: mol_type = other DNA
agccatcttgatcttcaggg

SEQ ID NO: 13898 - DNA, 20 bp, synthetic construct
  source 1..20: mol_type = other DNA
tagtccataccctgttgcac

SEQ ID NO: 13899 - DNA, 20 bp, synthetic construct
  source 1..20: mol_type = other DNA
gcacctctcatcattccaca

SEQ ID NO: 13900 - DNA, 20 bp, synthetic construct
  source 1..20: mol_type = other DNA
tccactgcccttgagtggtg

SEQ ID NO: 13901 - DNA, 20 bp, synthetic construct
  source 1..20: mol_type = other DNA
caaactcaggcaaacagcag

SEQ ID NO: 13902 - DNA, 20 bp, synthetic construct
  source 1..20: mol_type = other DNA
cagttctccgctcacgaggg

SEQ ID NO: 13903 - DNA, 20 bp, synthetic construct
  source 1..20: mol_type = other DNA
cgcatgtcactcaaggcggg

SEQ ID NO: 13904 - DNA, 20 bp, synthetic construct
  source 1..20: mol_type = other DNA
tcatctttcagtgtgggtgc

SEQ ID NO: 13905 - DNA, 20 bp, synthetic construct
  source 1..20: mol_type = other DNA
gtcagtcaaacgtgaagccc

SEQ ID NO: 13906 - DNA, 20 bp, synthetic construct
  source 1..20: mol_type = other DNA
gatgctgcacacattcagct

SEQ ID NO: 13907 - DNA, 20 bp, synthetic construct
  source 1..20: mol_type = other DNA
gaagatgcaggctcaaagtc

SEQ ID NO: 13908 - DNA, 20 bp, synthetic construct
  source 1..20: mol_type = other DNA
aggcatccaccatacttgaa

SEQ ID NO: 13909 - DNA, 20 bp, synthetic construct
  source 1..20: mol_type = other DNA
gtcaccaaatggaatcaaag

SEQ ID NO: 13910 - DNA, 20 bp, synthetic construct
  source 1..20: mol_type = other DNA
gagagaaagacatagtgatc

SEQ ID NO: 13911 - DNA, 20 bp, synthetic construct
  source 1..20: mol_type = other DNA
ggctagataccattcaccat

SEQ ID NO: 13912 - DNA, 20 bp, synthetic construct
  source 1..20: mol_type = other DNA
gcaccctgcagacggcattc

SEQ ID NO: 13913 - DNA, 20 bp, synthetic construct
  source 1..20: mol_type = other DNA
tggcatccgacagccacccg

SEQ ID NO: 13914 - DNA, 20 bp, synthetic construct
  source 1..20: mol_type = other DNA
tgcaggcggccaatagtgtc

SEQ ID NO: 13915 - DNA, 20 bp, synthetic construct
  source 1..20: mol_type = other DNA
ggctgcaggcaccattatgg

SEQ ID NO: 13916 - DNA, 20 bp, synthetic construct
  source 1..20: mol_type = other DNA
tttgacgcatttcccgcttt

SEQ ID NO: 13917 - DNA, 20 bp, synthetic construct
  source 1..20: mol_type = other DNA
gctgtcagtgaagccgaaaa

SEQ ID NO: 13918 - DNA, 20 bp, synthetic construct
  source 1..20: mol_type = other DNA
aaacccacccatgaactgca

SEQ ID NO: 13919 - DNA, 20 bp, synthetic construct
  source 1..20: mol_type = other DNA
gccatccagacacagaaaca

SEQ ID NO: 13920 - DNA, 20 bp, synthetic construct
  source 1..20: mol_type = other DNA
cagccggccacgcaacaggt

SEQ ID NO: 13921 - DNA, 20 bp, synthetic construct
  source 1..20: mol_type = other DNA
ccatcggccacaggcacact

SEQ ID NO: 13922 - DNA, 20 bp, synthetic construct
  source 1..20: mol_type = other DNA
aaagaggtcaacagtctgga

SEQ ID NO: 13923 - DNA, 20 bp, synthetic construct
  source 1..20: mol_type = other DNA
ctgcagattcttgggttgtg

SEQ ID NO: 13924 - DNA, 20 bp, synthetic construct
  source 1..20: mol_type = other DNA
gcaggagcgcagagggcagt

SEQ ID NO: 13925 - DNA, 20 bp, synthetic construct
  source 1..20: mol_type = other DNA
agaacctagagacttccttt

SEQ ID NO: 13926 - DNA, 20 bp, synthetic construct
  source 1..20: mol_type = other DNA
tttgcacattgcattcccaa

SEQ ID NO: 13927 - DNA, 20 bp, synthetic construct
  source 1..20: mol_type = other DNA
actgtatggaaaatgagagc

SEQ ID NO: 13928 - DNA, 20 bp, synthetic construct
  source 1..20: mol_type = other DNA
tctccacaacttaagagcaa

SEQ ID NO: 13929 - DNA, 20 bp, synthetic construct
  source 1..20: mol_type = other DNA
gaggagggtaatgtcacgtg

SEQ ID NO: 13930 - DNA, 20 bp, synthetic construct
  source 1..20: mol_type = other DNA
ccctttttcactgaattacc

SEQ ID NO: 13931 - DNA, 20 bp, synthetic construct
  source 1..20: mol_type = other DNA
gttatctttaggtcctcgag

SEQ ID NO: 13932 - DNA, 20 bp, synthetic construct
  source 1..20: mol_type = other DNA
gggcaaagggttgaattggt

SEQ ID NO: 13933 - DNA, 20 bp, synthetic construct
  source 1..20: mol_type = other DNA
atcttcctgaacattcagtg

SEQ ID NO: 13934 - DNA, 20 bp, synthetic construct
  source 1..20: mol_type = other DNA
aggcactgagaagtaagacc

SEQ ID NO: 13935 - DNA, 20 bp, synthetic construct
  source 1..20: mol_type = other DNA
tttaagaagggtttaagcgg

SEQ ID NO: 13936 - DNA, 20 bp, synthetic construct
  source 1..20: mol_type = other DNA
tctaatccgttgaaagctac

SEQ ID NO: 13937 - DNA, 20 bp, synthetic construct
  source 1..20: mol_type = other DNA
gtcttccatatacagcacaa

SEQ ID NO: 13938 - DNA, 20 bp, synthetic construct
  source 1..20: mol_type = other DNA
cgcagcagtatcctagtaca

SEQ ID NO: 13939 - DNA, 20 bp, synthetic construct
  source 1..20: mol_type = other DNA
aagcatcctgtacataaagg

SEQ ID NO: 13940 - DNA, 20 bp, synthetic construct
  source 1..20: mol_type = other DNA
ggacttgatggtcactgctt

SEQ ID NO: 13941 - DNA, 20 bp, synthetic construct
  source 1..20: mol_type = other DNA
taagtatatccaaccgtccc

SEQ ID NO: 13942 - DNA, 20 bp, synthetic construct
  source 1..20: mol_type = other DNA
agcgctgccgaaatcccgga

SEQ ID NO: 13943 - DNA, 20 bp, synthetic construct
  source 1..20: mol_type = other DNA
tattttgcccgtcttgtagc

SEQ ID NO: 13944 - DNA, 20 bp, synthetic construct
  source 1..20: mol_type = other DNA
ggaggtagaatgtcactgat

SEQ ID NO: 13945 - DNA, 20 bp, synthetic construct
  source 1..20: mol_type = other DNA
ttaaaatagccatgaggacc

SEQ ID NO: 13946 - DNA, 20 bp, synthetic construct
  source 1..20: mol_type = other DNA
ttccttgctgactttgttcc

SEQ ID NO: 13947 - DNA, 20 bp, synthetic construct
  source 1..20: mol_type = other DNA
gataccttgtagatatcctg

SEQ ID NO: 13948 - DNA, 20 bp, synthetic construct
  source 1..20: mol_type = other DNA
gagccatctcctggaaagat

SEQ ID NO: 13949 - DNA, 20 bp, synthetic construct
  source 1..20: mol_type = other DNA
gacctctgagtattcggtgg

SEQ ID NO: 13950 - DNA, 20 bp, synthetic construct
  source 1..20: mol_type = other DNA
gtacttccaagggtactagg

SEQ ID NO: 13951 - DNA, 20 bp, synthetic construct
  source 1..20: mol_type = other DNA
gagtgctgcaaggccatcga

SEQ ID NO: 13952 - DNA, 20 bp, synthetic construct
  source 1..20: mol_type = other DNA
ctgcgggaaaccgttttcca

SEQ ID NO: 13953 - DNA, 20 bp, synthetic construct
  source 1..20: mol_type = other DNA
tgtaatgtctgagagcagtg

SEQ ID NO: 13954 - DNA, 20 bp, synthetic construct
  source 1..20: mol_type = other DNA
cctctattctccctctaaac

SEQ ID NO: 13955 - DNA, 20 bp, synthetic construct
  source 1..20: mol_type = other DNA
cactttgctccaattctgaa

SEQ ID NO: 13956 - DNA, 20 bp, synthetic construct
  source 1..20: mol_type = other DNA
aagaaaaggagggaactgaa

SEQ ID NO: 13957 - DNA, 20 bp, synthetic construct
  source 1..20: mol_type = other DNA
cattttccagggttaccaag

SEQ ID NO: 13958 - DNA, 20 bp, synthetic construct
  source 1..20: mol_type = other DNA
ttgtccaagggtgacatttt

SEQ ID NO: 13959 - DNA, 20 bp, synthetic construct
  source 1..20: mol_type = other DNA
gtattctcctttctggacat

SEQ ID NO: 13960 - DNA, 20 bp, synthetic construct
  source 1..20: mol_type = other DNA
ggatgtgaggatgtacaccc

SEQ ID NO: 13961 - DNA, 20 bp, synthetic construct
  source 1..20: mol_type = other DNA
acagtgaatcatcaaggcca

SEQ ID NO: 13962 - DNA, 20 bp, synthetic construct
  source 1..20: mol_type = other DNA
caagtgcctaaaagggactc

SEQ ID NO: 13963 - DNA, 20 bp, synthetic construct
  source 1..20: mol_type = other DNA
gcccatctggagcttagggt

SEQ ID NO: 13964 - DNA, 20 bp, synthetic construct
  source 1..20: mol_type = other DNA
ccagctgttacaaaaccagt

SEQ ID NO: 13965 - DNA, 20 bp, synthetic construct
  source 1..20: mol_type = other DNA
ggctgtagtgggttaacggt

SEQ ID NO: 13966 - DNA, 20 bp, synthetic construct
  source 1..20: mol_type = other DNA
ctgctcatttcaaacaggag

SEQ ID NO: 13967 - DNA, 20 bp, synthetic construct
  source 1..20: mol_type = other DNA
ccgggcccaagaactcaggg

SEQ ID NO: 13968 - DNA, 20 bp, synthetic construct
  source 1..20: mol_type = other DNA
tggctcttgttcacattctg

SEQ ID NO: 13969 - DNA, 20 bp, synthetic construct
  source 1..20: mol_type = other DNA
gtagatgcgagtttgtgcca

SEQ ID NO: 13970 - DNA, 20 bp, synthetic construct
  source 1..20: mol_type = other DNA
accacaggacagcgttgcca

SEQ ID NO: 13971 - DNA, 20 bp, synthetic construct
  source 1..20: mol_type = other DNA
tgtccgaatcaaaacttgtg

SEQ ID NO: 13972 - DNA, 20 bp, synthetic construct
  source 1..20: mol_type = other DNA
caagcactgacagttcagaa

SEQ ID NO: 13973 - DNA, 20 bp, synthetic construct
  source 1..20: mol_type = other DNA
tggttgcagtaaagggtgat

SEQ ID NO: 13974 - DNA, 20 bp, synthetic construct
  source 1..20: mol_type = other DNA
agagggattcattttccagg

SEQ ID NO: 13975 - DNA, 20 bp, synthetic construct
  source 1..20: mol_type = other DNA
ggaggaggagatccattccc

SEQ ID NO: 13976 - DNA, 20 bp, synthetic construct
  source 1..20: mol_type = other DNA
gctgttactgtcagccattg

SEQ ID NO: 13977 - DNA, 20 bp, synthetic construct
  source 1..20: mol_type = other DNA
tgacgcccaagaaaatggat

SEQ ID NO: 13978 - DNA, 20 bp, synthetic construct
  source 1..20: mol_type = other DNA
ctttgctctctatttgtagc

SEQ ID NO: 13979 - DNA, 20 bp, synthetic construct
  source 1..20: mol_type = other DNA
ccattgcccacacatcgcaa

SEQ ID NO: 13980 - DNA, 20 bp, synthetic construct
  source 1..20: mol_type = other DNA
acacgcaccagcgagacgcc

SEQ ID NO: 13981 - DNA, 20 bp, synthetic construct
  source 1..20: mol_type = other DNA
gccgaagcactgtcacccgg

SEQ ID NO: 13982 - DNA, 20 bp, synthetic construct
  source 1..20: mol_type = other DNA
gcttcctagaaggtcatacc

SEQ ID NO: 13983 - DNA, 20 bp, synthetic construct
  source 1..20: mol_type = other DNA
ttctttcaggacatcttctc

SEQ ID NO: 13984 - DNA, 20 bp, synthetic construct
  source 1..20: mol_type = other DNA
cacgtgatgttgcatttcgt

SEQ ID NO: 13985 - DNA, 20 bp, synthetic construct
  source 1..20: mol_type = other DNA
ctcgccgatctgcttctcga

SEQ ID NO: 13986 - DNA, 20 bp, synthetic construct
  source 1..20: mol_type = other DNA
gtgggaaccagtattaggag

SEQ ID NO: 13987 - DNA, 20 bp, synthetic construct
  source 1..20: mol_type = other DNA
aagcaggaggtggaaactaa

SEQ ID NO: 13988 - DNA, 20 bp, synthetic construct
  source 1..20: mol_type = other DNA
gccagcaaactcctggatat

SEQ ID NO: 13989 - DNA, 20 bp, synthetic construct
  source 1..20: mol_type = other DNA
tccgaagaaggaggcatcaa

SEQ ID NO: 13990 - DNA, 20 bp, synthetic construct
  source 1..20: mol_type = other DNA
tgctcgaaggatgtgtcccg

SEQ ID NO: 13991 - DNA, 20 bp, synthetic construct
  source 1..20: mol_type = other DNA
gaattggccatcatgatgca

SEQ ID NO: 13992 - DNA, 20 bp, synthetic construct
  source 1..20: mol_type = other DNA
cagtgccgtatggctgtgcc

SEQ ID NO: 13993 - DNA, 20 bp, synthetic construct
  source 1..20: mol_type = other DNA
cttcacctccaggtgtttac

SEQ ID NO: 13994 - DNA, 20 bp, synthetic construct
  source 1..20: mol_type = other DNA
ggattctgagcatagacact

SEQ ID NO: 13995 - DNA, 20 bp, synthetic construct
  source 1..20: mol_type = other DNA
cgcactcgatatccagtgag

SEQ ID NO: 13996 - DNA, 20 bp, synthetic construct
  source 1..20: mol_type = other DNA
acatccgggccacttgcaga

SEQ ID NO: 13997 - DNA, 20 bp, synthetic construct
  source 1..20: mol_type = other DNA
ggcacctggtacttgaggca

SEQ ID NO: 13998 - DNA, 20 bp, synthetic construct
  source 1..20: mol_type = other DNA
ccatcttcttcagtttttgg

SEQ ID NO: 13999 - DNA, 20 bp, synthetic construct
  source 1..20: mol_type = other DNA
cacacgacagacatttattg

SEQ ID NO: 14000 - DNA, 20 bp, synthetic construct
  source 1..20: mol_type = other DNA
tgttttgaacaatgacgacc

SEQ ID NO: 14001 - DNA, 20 bp, synthetic construct
  source 1..20: mol_type = other DNA
tgtttggcagttctgaagag

SEQ ID NO: 14002 - DNA, 20 bp, synthetic construct
  source 1..20: mol_type = other DNA
ggaaaacaccctcgcacaac

SEQ ID NO: 14003 - DNA, 20 bp, synthetic construct
  source 1..20: mol_type = other DNA
tttaaggtcaccttcgcgtg

SEQ ID NO: 14004 - DNA, 20 bp, synthetic construct
  source 1..20: mol_type = other DNA
tccactcagctaagaggtat

SEQ ID NO: 14005 - DNA, 20 bp, synthetic construct
  source 1..20: mol_type = other DNA
ataggagagaataccttggg

SEQ ID NO: 14006 - DNA, 20 bp, synthetic construct
  source 1..20: mol_type = other DNA
cccagatgaaatgtgttgat

SEQ ID NO: 14007 - DNA, 20 bp, synthetic construct
  source 1..20: mol_type = other DNA
agtgaccttattgccctttg

SEQ ID NO: 14008 - DNA, 20 bp, synthetic construct
  source 1..20: mol_type = other DNA
gtcttcataagggagacaaa

SEQ ID NO: 14009 - DNA, 20 bp, synthetic construct
  source 1..20: mol_type = other DNA
cagtatctggatgtccaata

SEQ ID NO: 14010 - DNA, 20 bp, synthetic construct
  source 1..20: mol_type = other DNA
ctgaggtcaaggattgtaat

SEQ ID NO: 14011 - DNA, 20 bp, synthetic construct
  source 1..20: mol_type = other DNA
tatggccattttcttcttgg

SEQ ID NO: 14012 - DNA, 20 bp, synthetic construct
  source 1..20: mol_type = other DNA
cgttcgcctttctttcccgg

SEQ ID NO: 14013 - DNA, 20 bp, synthetic construct
  source 1..20: mol_type = other DNA
cacgtctatcaagacgagcg

SEQ ID NO: 14014 - DNA, 20 bp, synthetic construct
  source 1..20: mol_type = other DNA
gccatggtgatgcatcccag

SEQ ID NO: 14015 - DNA, 20 bp, synthetic construct
  source 1..20: mol_type = other DNA
gcagtctccatcacgaaatg

SEQ ID NO: 14016 - DNA, 20 bp, synthetic construct
  source 1..20: mol_type = other DNA
tgcctaagaaaagagttcca

SEQ ID NO: 14017 - DNA, 20 bp, synthetic construct
  source 1..20: mol_type = other DNA
catcacttggatgagttcat

SEQ ID NO: 14018 - DNA, 20 bp, synthetic construct
  source 1..20: mol_type = other DNA
gtgcaggtgacggaggtccc

SEQ ID NO: 14019 - DNA, 20 bp, synthetic construct
  source 1..20: mol_type = other DNA
gtgggttttcacagcttcgc

SEQ ID NO: 14020 - DNA, 20 bp, synthetic construct
  source 1..20: mol_type = other DNA
cagggacacgttgtacaggg

SEQ ID NO: 14021 - DNA, 20 bp, synthetic construct
  source 1..20: mol_type = other DNA
gtggtggaaaaattctgctt

SEQ ID NO: 14022 - DNA, 20 bp, synthetic construct
  source 1..20: mol_type = other DNA
gccagacttagactggctta

SEQ ID NO: 14023 - DNA, 20 bp, synthetic construct
  source 1..20: mol_type = other DNA
aaaacagctcaacagctaga

SEQ ID NO: 14024 - DNA, 20 bp, synthetic construct
  source 1..20: mol_type = other DNA
gtttcttccaatcaactggg

SEQ ID NO: 14025 - DNA, 20 bp, synthetic construct
  source 1..20: mol_type = other DNA
tggacaaactgccttaagaa

SEQ ID NO: 14026 - DNA, 20 bp, synthetic construct
  source 1..20: mol_type = other DNA
agcttgtccatggccacaac

SEQ ID NO: 14027 - DNA, 20 bp, synthetic construct
  source 1..20: mol_type = other DNA
gtggccgtggtttctgtcag

SEQ ID NO: 14028 - DNA, 20 bp, synthetic construct
  source 1..20: mol_type = other DNA
acagagcatatagagtgacc

SEQ ID NO: 14029 - DNA, 20 bp, synthetic construct
  source 1..20: mol_type = other DNA
ggacctctgtgtagagccct

SEQ ID NO: 14030 - DNA, 20 bp, synthetic construct
  source 1..20: mol_type = other DNA
gagatttcccagcttatgtt

SEQ ID NO: 14031 - DNA, 20 bp, synthetic construct
  source 1..20: mol_type = other DNA
ccttgcagaggcttgacccg

SEQ ID NO: 14032 - DNA, 20 bp, synthetic construct
  source 1..20: mol_type = other DNA
ggtatacctcaaactccaaa

SEQ ID NO: 14033 - DNA, 20 bp, synthetic construct
  source 1..20: mol_type = other DNA
cagggctgagatgccgtcga

SEQ ID NO: 14034 - DNA, 20 bp, synthetic construct
  source 1..20: mol_type = other DNA
ctccttcccgatagacgaca

SEQ ID NO: 14035 - DNA, 20 bp, synthetic construct
  source 1..20: mol_type = other DNA
taccagtcctttaagccaac

SEQ ID NO: 14036 - DNA, 20 bp, synthetic construct
  source 1..20: mol_type = other DNA
acacctggaagttgtacaga

SEQ ID NO: 14037 - DNA, 20 bp, synthetic construct
  source 1..20: mol_type = other DNA
ctcgggcgcacgtcttgcct

SEQ ID NO: 14038 - DNA, 20 bp, synthetic construct
  source 1..20: mol_type = other DNA
aagctcagccagaaagtcgg

SEQ ID NO: 14039 - DNA, 20 bp, synthetic construct
  source 1..20: mol_type = other DNA
gctgcatgacccgactggta

SEQ ID NO: 14040 - DNA, 20 bp, synthetic construct
  source 1..20: mol_type = other DNA
cacgctgtctccaaacccag

SEQ ID NO: 14041 - DNA, 20 bp, synthetic construct
  source 1..20: mol_type = other DNA
gtttcagcgaggcttgtggg

SEQ ID NO: 14042 - DNA, 20 bp, synthetic construct
  source 1..20: mol_type = other DNA
tcaccgcgaagatgggctgg

SEQ ID NO: 14043 - DNA, 20 bp, synthetic construct
  source 1..20: mol_type = other DNA
atcttcggaagaacggatga

SEQ ID NO: 14044 - DNA, 20 bp, synthetic construct
  source 1..20: mol_type = other DNA
ggcagcattgacgtcagaat

SEQ ID NO: 14045 - DNA, 20 bp, synthetic construct
  source 1..20: mol_type = other DNA
atgccagctacgattacgaa

SEQ ID NO: 14046 - DNA, 20 bp, synthetic construct
  source 1..20: mol_type = other DNA
ccaatccaaaacagaattgc

SEQ ID NO: 14047 - DNA, 20 bp, synthetic construct
  source 1..20: mol_type = other DNA
catagtcaagagtcaggata

SEQ ID NO: 14048 - DNA, 20 bp, synthetic construct
  source 1..20: mol_type = other DNA
tttcagaaagaacagcgttg

SEQ ID NO: 14049 - DNA, 20 bp, synthetic construct
  source 1..20: mol_type = other DNA
cacttcccttggtatttgag

SEQ ID NO: 14050 - DNA, 20 bp, synthetic construct
  source 1..20: mol_type = other DNA
gaaggagcagttcaaaatga

SEQ ID NO: 14051 - DNA, 20 bp, synthetic construct
  source 1..20: mol_type = other DNA
gtggcggagagcagacagag

SEQ ID NO: 14052 - DNA, 20 bp, synthetic construct
  source 1..20: mol_type = other DNA
tgcttccctggaaagatggg

SEQ ID NO: 14053 - DNA, 20 bp, synthetic construct
  source 1..20: mol_type = other DNA
cagtaggagaacagcacccg

SEQ ID NO: 14054 - DNA, 20 bp, synthetic construct
  source 1..20: mol_type = other DNA
taagtggctcaacccgatat

SEQ ID NO: 14055 - DNA, 20 bp, synthetic construct
  source 1..20: mol_type = other DNA
ctgaagagtggttttggacc

SEQ ID NO: 14056 - DNA, 20 bp, synthetic construct
  source 1..20: mol_type = other DNA
attgccaaagggataatcgg

SEQ ID NO: 14057 - DNA, 20 bp, synthetic construct
  source 1..20: mol_type = other DNA
gtccttgaagttgatctccc

SEQ ID NO: 14058 - DNA, 20 bp, synthetic construct
  source 1..20: mol_type = other DNA
ccgccagccttacggcgtac

SEQ ID NO: 14059 - DNA, 20 bp, synthetic construct
  source 1..20: mol_type = other DNA
tattgccctgccatgcggga

SEQ ID NO: 14060 - DNA, 20 bp, synthetic construct
  source 1..20: mol_type = other DNA
tgcatcgtccgggatgctct

SEQ ID NO: 14061 - DNA, 20 bp, synthetic construct
  source 1..20: mol_type = other DNA
cccacagcctcaaaccagaa

SEQ ID NO: 14062 - DNA, 20 bp, synthetic construct
  source 1..20: mol_type = other DNA
gtctcaatagcctcttctag

SEQ ID NO: 14063 - DNA, 20 bp, synthetic construct
  source 1..20: mol_type = other DNA
aggatttccatagtgccaat

SEQ ID NO: 14064 - DNA, 20 bp, synthetic construct
  source 1..20: mol_type = other DNA
ttagcacgaagctctccgat

SEQ ID NO: 14065 - DNA, 20 bp, synthetic construct
  source 1..20: mol_type = other DNA
aagggcttgatatcaaagga

SEQ ID NO: 14066 - DNA, 20 bp, synthetic construct
  source 1..20: mol_type = other DNA
cgtcttcttgatcacctgca

SEQ ID NO: 14067 - DNA, 20 bp, synthetic construct
  source 1..20: mol_type = other DNA
gaagtagatgttcatcccgt

SEQ ID NO: 14068 - DNA, 20 bp, synthetic construct
  source 1..20: mol_type = other DNA
gaaccttgaggctacagaga

SEQ ID NO: 14069 - DNA, 20 bp, synthetic construct
  source 1..20: mol_type = other DNA
acgtccagcccgaccttcca

SEQ ID NO: 14070 - DNA, 20 bp, synthetic construct
  source 1..20: mol_type = other DNA
gatgctgccgtggatgccta

SEQ ID NO: 14071 - DNA, 20 bp, synthetic construct
  source 1..20: mol_type = other DNA
agctggccctcgcttatgat

SEQ ID NO: 14072 - DNA, 20 bp, synthetic construct
  source 1..20: mol_type = other DNA
ttgatatcatctagtccgga

SEQ ID NO: 14073 - DNA, 20 bp, synthetic construct
  source 1..20: mol_type = other DNA
cccagcttcacagagtattg

SEQ ID NO: 14074 - DNA, 20 bp, synthetic construct
  source 1..20: mol_type = other DNA
ctgaagctgaagtttcccaa

SEQ ID NO: 14075 - DNA, 20 bp, synthetic construct
  source 1..20: mol_type = other DNA
ggtttcttcaatcccagtta

SEQ ID NO: 14076 - DNA, 20 bp, synthetic construct
  source 1..20: mol_type = other DNA
ggccgtgttgacgataccgg

SEQ ID NO: 14077 - DNA, 20 bp, synthetic construct
  source 1..20: mol_type = other DNA
ctccaaagaaaagcgactat

SEQ ID NO: 14078 - DNA, 20 bp, synthetic construct
  source 1..20: mol_type = other DNA
atgaaaacggatggtggcaa

SEQ ID NO: 14079 - DNA, 20 bp, synthetic construct
  source 1..20: mol_type = other DNA
gaatcgttggttgacacgtt

SEQ ID NO: 14080 - DNA, 20 bp, synthetic construct
  source 1..20: mol_type = other DNA
gagtaggtttttctctttgg

SEQ ID NO: 14081 - DNA, 20 bp, synthetic construct
  source 1..20: mol_type = other DNA
cctcgttggcaaagcttcga

SEQ ID NO: 14082 - DNA, 20 bp, synthetic construct
  source 1..20: mol_type = other DNA
cctccaagtgtaagggagtc

SEQ ID NO: 14083 - DNA, 20 bp, synthetic construct
  source 1..20: mol_type = other DNA
cttggaccacaacaggtggt

SEQ ID NO: 14084 - DNA, 20 bp, synthetic construct
  source 1..20: mol_type = other DNA
ccttcatccgtttcccaaat

SEQ ID NO: 14085 - DNA, 20 bp, synthetic construct
  source 1..20: mol_type = other DNA
ggacgacgtcttcccgacgc

SEQ ID NO: 14086 - DNA, 20 bp, synthetic construct
  source 1..20: mol_type = other DNA
aggcgtgtttacatgcaggc

SEQ ID NO: 14087 - DNA, 20 bp, synthetic construct
  source 1..20: mol_type = other DNA
tcccaggccacttcatcaca

SEQ ID NO: 14088 - DNA, 20 bp, synthetic construct
  source 1..20: mol_type = other DNA
ctccaagaatttcctacaag

SEQ ID NO: 14089 - DNA, 20 bp, synthetic construct
  source 1..20: mol_type = other DNA
gcagccggagggaactctgg

SEQ ID NO: 14090 - DNA, 20 bp, synthetic construct
  source 1..20: mol_type = other DNA
gtgatcctgttgttggacag

SEQ ID NO: 14091 - DNA, 20 bp, synthetic construct
  source 1..20: mol_type = other DNA
ttgtccatgataagaccagg

SEQ ID NO: 14092 - DNA, 20 bp, synthetic construct
  source 1..20: mol_type = other DNA
agaggaggagtattagaaga

SEQ ID NO: 14093 - DNA, 20 bp, synthetic construct
  source 1..20: mol_type = other DNA
agtcctgctcttttccaggt

SEQ ID NO: 14094 - DNA, 20 bp, synthetic construct
  source 1..20: mol_type = other DNA
cctgtcctcacagattgcgt

SEQ ID NO: 14095 - DNA, 20 bp, synthetic construct
  source 1..20: mol_type = other DNA
gaggaccagcaacagagtgg

SEQ ID NO: 14096 - DNA, 20 bp, synthetic construct
  source 1..20: mol_type = other DNA
tcagcagcacttattttcgt

SEQ ID NO: 14097 - DNA, 20 bp, synthetic construct
  source 1..20: mol_type = other DNA
cagctgaatagcaggaatta

SEQ ID NO: 14098 - DNA, 20 bp, synthetic construct
  source 1..20: mol_type = other DNA
aataagtgaccacagggaat

SEQ ID NO: 14099 - DNA, 20 bp, synthetic construct
  source 1..20: mol_type = other DNA
cggccctggaaaccgaaggc

SEQ ID NO: 14100 - DNA, 20 bp, synthetic construct
  source 1..20: mol_type = other DNA
ctccacgtcccggatcatgc

SEQ ID NO: 14101 - DNA, 20 bp, synthetic construct
  source 1..20: mol_type = other DNA
tgatcccaaagtagacctgc

SEQ ID NO: 14102 - DNA, 20 bp, synthetic construct
  source 1..20: mol_type = other DNA
cctgtctccgcttttttctt

SEQ ID NO: 14103 - DNA, 20 bp, synthetic construct
  source 1..20: mol_type = other DNA
gtttgcgtactctgcctttg

SEQ ID NO: 14104 - DNA, 20 bp, synthetic construct
  source 1..20: mol_type = other DNA
tggatggcagtagctgcgct

SEQ ID NO: 14105 - DNA, 20 bp, synthetic construct
  source 1..20: mol_type = other DNA
cagcgtggtttctgtatcga

SEQ ID NO: 14106 - DNA, 20 bp, synthetic construct
  source 1..20: mol_type = other DNA
ctgcatgattctgagcaggt

SEQ ID NO: 14107 - DNA, 20 bp, synthetic construct
  source 1..20: mol_type = other DNA
catggtattggtggaaaaga

SEQ ID NO: 14108 - DNA, 20 bp, synthetic construct
  source 1..20: mol_type = other DNA
gtaggcggatgggcgtctcc

SEQ ID NO: 14109 - DNA, 20 bp, synthetic construct
  source 1..20: mol_type = other DNA
tgtaaccgtgggtgtcaccg

SEQ ID NO: 14110 - DNA, 20 bp, synthetic construct
  source 1..20: mol_type = other DNA
ttctacgtcaccctcatgat

SEQ ID NO: 14111 - DNA, 20 bp, synthetic construct
  source 1..20: mol_type = other DNA
ggaccattttctactcctag

SEQ ID NO: 14112 - DNA, 20 bp, synthetic construct
  source 1..20: mol_type = other DNA
tttttctcgccggtactgac

SEQ ID NO: 14113 - DNA, 20 bp, synthetic construct
  source 1..20: mol_type = other DNA
cccgcatgttcaagaagacg

SEQ ID NO: 14114 - DNA, 20 bp, synthetic construct
  source 1..20: mol_type = other DNA
tgggattcgtgtagtgcttc

SEQ ID NO: 14115 - DNA, 20 bp, synthetic construct
  source 1..20: mol_type = other DNA
gggctttgttggagaccttg

SEQ ID NO: 14116 - DNA, 20 bp, synthetic construct
  source 1..20: mol_type = other DNA
aggctcttctgtgtgtagtg

SEQ ID NO: 14117 - DNA, 20 bp, synthetic construct
  source 1..20: mol_type = other DNA
ggaatgtgtactagtcccat

SEQ ID NO: 14118 - DNA, 20 bp, synthetic construct
  source 1..20: mol_type = other DNA
acagtcctttgcatgcagat

SEQ ID NO: 14119 - DNA, 20 bp, synthetic construct
  source 1..20: mol_type = other DNA
agctctgcagcccataagca

SEQ ID NO: 14120 - DNA, 20 bp, synthetic construct
  source 1..20: mol_type = other DNA
gcaggtagcagtgttcatac

SEQ ID NO: 14121 - DNA, 20 bp, synthetic construct
  source 1..20: mol_type = other DNA
gagtggtccactgtcttgag

SEQ ID NO: 14122 - DNA, 20 bp, synthetic construct
  source 1..20: mol_type = other DNA
gcaggattccggctcacggc

SEQ ID NO: 14123 - DNA, 20 bp, synthetic construct
  source 1..20: mol_type = other DNA
ctctagtcgctgtggtgttc

SEQ ID NO: 14124 - DNA, 20 bp, synthetic construct
  source 1..20: mol_type = other DNA
gtggaaagcagaagtctaag

SEQ ID NO: 14125 - DNA, 20 bp, synthetic construct
  source 1..20: mol_type = other DNA
tgtaggctcagaatatgtct

SEQ ID NO: 14126 - DNA, 20 bp, synthetic construct
  source 1..20: mol_type = other DNA
gtgtggtccatccttggaag

SEQ ID NO: 14127 - DNA, 20 bp, synthetic construct
  source 1..20: mol_type = other DNA
gcatcaaatctagaaggttc

SEQ ID NO: 14128 - DNA, 20 bp, synthetic construct
  source 1..20: mol_type = other DNA
atggattcctttgcctcttg

SEQ ID NO: 14129 - DNA, 20 bp, synthetic construct
  source 1..20: mol_type = other DNA
caaggcaaatgtgtgaaagg

SEQ ID NO: 14130 - DNA, 20 bp, synthetic construct
  source 1..20: mol_type = other DNA
tgggcaccaatcatgcttcc

SEQ ID NO: 14131 - DNA, 20 bp, synthetic construct
  source 1..20: mol_type = other DNA
gttaaccattgagtgttcac

SEQ ID NO: 14132 - DNA, 20 bp, synthetic construct
  source 1..20: mol_type = other DNA
gaaggcccggtcgaagttca

SEQ ID NO: 14133 - DNA, 20 bp, synthetic construct
  source 1..20: mol_type = other DNA
ctcgttttctccatagtcat

SEQ ID NO: 14134 - DNA, 20 bp, synthetic construct
  source 1..20: mol_type = other DNA
ctgtaggtgctgaaatcaac

SEQ ID NO: 14135 - DNA, 20 bp, synthetic construct
  source 1..20: mol_type = other DNA
ccacgagacatacagcaact

SEQ ID NO: 14136 - DNA, 20 bp, synthetic construct
  source 1..20: mol_type = other DNA
ctcgaggtccatttccagcg

SEQ ID NO: 14137 - DNA, 20 bp, synthetic construct
  source 1..20: mol_type = other DNA
tgtttcttacacttccctgc

SEQ ID NO: 14138 - DNA, 20 bp, synthetic construct
  source 1..20: mol_type = other DNA
agtaggctcttgcacatgac

SEQ ID NO: 14139 - DNA, 20 bp, synthetic construct
  source 1..20: mol_type = other DNA
taggagtcacatgtcatccc

SEQ ID NO: 14140 - DNA, 20 bp, synthetic construct
  source 1..20: mol_type = other DNA
gataccgaaacgtgaccggt

SEQ ID NO: 14141 - DNA, 20 bp, synthetic construct
  source 1..20: mol_type = other DNA
cactagcatgatgtaaatcg

SEQ ID NO: 14142 - DNA, 20 bp, synthetic construct
  source 1..20: mol_type = other DNA
aggagggtcaaactataaca

SEQ ID NO: 14143 - DNA, 20 bp, synthetic construct
  source 1..20: mol_type = other DNA
tggtctcgcccgaaagccat

SEQ ID NO: 14144 - DNA, 20 bp, synthetic construct
  source 1..20: mol_type = other DNA
agcaaacgtctggtgctcta

SEQ ID NO: 14145 - DNA, 20 bp, synthetic construct
  source 1..20: mol_type = other DNA
tacgtacgcagcggcgttaa

SEQ ID NO: 14146 - DNA, 20 bp, synthetic construct
  source 1..20: mol_type = other DNA
ttacaactgcgagaattgac

SEQ ID NO: 14147 - DNA, 20 bp, synthetic construct
  source 1..20: mol_type = other DNA
acataaagggagactgtaag

SEQ ID NO: 14148 - DNA, 20 bp, synthetic construct
  source 1..20: mol_type = other DNA
taatcgagagcacttgtcag

SEQ ID NO: 14149 - DNA, 20 bp, synthetic construct
  source 1..20: mol_type = other DNA
ccatgttttagccgtacagg

SEQ ID NO: 14150 - DNA, 20 bp, synthetic construct
  source 1..20: mol_type = other DNA
aatagcgatgtgacatgtgc

SEQ ID NO: 14151 - DNA, 20 bp, synthetic construct
  source 1..20: mol_type = other DNA
caaacaaacccaatggcaac

SEQ ID NO: 14152 - DNA, 20 bp, synthetic construct
  source 1..20: mol_type = other DNA
ggcagtgtagactttaattc

SEQ ID NO: 14153 - DNA, 20 bp, synthetic construct
  source 1..20: mol_type = other DNA
aggtaacgagtcagagcttt

SEQ ID NO: 14154 - DNA, 20 bp, synthetic construct
  source 1..20: mol_type = other DNA
agcatcacaggaccattaat

SEQ ID NO: 14155 - DNA, 20 bp, synthetic construct
  source 1..20: mol_type = other DNA
tctctgggaaactcatgaaa

SEQ ID NO: 14156 - DNA, 20 bp, synthetic construct
  source 1..20: mol_type = other DNA
tccaggcatgcagtaaactg

SEQ ID NO: 14157 - DNA, 20 bp, synthetic construct
  source 1..20: mol_type = other DNA
tgctgcttctgaagaactga

SEQ ID NO: 14158 - DNA, 20 bp, synthetic construct
  source 1..20: mol_type = other DNA
gccagcagtaatcgaataac

SEQ ID NO: 14159 - DNA, 20 bp, synthetic construct
  source 1..20: mol_type = other DNA
ttgcaggctttttgtatagc

SEQ ID NO: 14160 - DNA, 20 bp, synthetic construct
  source 1..20: mol_type = other DNA
tagggaacagaaagttccaa

SEQ ID NO: 14161 - DNA, 20 bp, synthetic construct
  source 1..20: mol_type = other DNA
tgggctgcaactatagctac

SEQ ID NO: 14162 - DNA, 20 bp, synthetic construct
  source 1..20: mol_type = other DNA
gagcaccgtgactgcgttca

SEQ ID NO: 14163 - DNA, 20 bp, synthetic construct
  source 1..20: mol_type = other DNA
atgttagcgcgtagctaccc

SEQ ID NO: 14164 - DNA, 20 bp, synthetic construct
  source 1..20: mol_type = other DNA
cttgaccaataggttgacct

SEQ ID NO: 14165 - DNA, 20 bp, synthetic construct
  source 1..20: mol_type = other DNA
cccaggaactgtgtcctaga

SEQ ID NO: 14166 - DNA, 20 bp, synthetic construct
  source 1..20: mol_type = other DNA
caaaactgcagccagatcag

SEQ ID NO: 14167 - DNA, 20 bp, synthetic construct
  source 1..20: mol_type = other DNA
gcgatctcctcgttgagaga

SEQ ID NO: 14168 - DNA, 20 bp, synthetic construct
  source 1..20: mol_type = other DNA
aatgtttctggacacacagc

SEQ ID NO: 14169 - DNA, 20 bp, synthetic construct
  source 1..20: mol_type = other DNA
caatgtggtcgtggagtttc

SEQ ID NO: 14170 - DNA, 20 bp, synthetic construct
  source 1..20: mol_type = other DNA
tgggcatgcaggcgtagttc

SEQ ID NO: 14171 - DNA, 20 bp, synthetic construct
  source 1..20: mol_type = other DNA
tctgcctacacgtttatgag

SEQ ID NO: 14172 - DNA, 20 bp, synthetic construct
  source 1..20: mol_type = other DNA
gctccctctttggttgacct

SEQ ID NO: 14173 - DNA, 20 bp, synthetic construct
  source 1..20: mol_type = other DNA
ggcgaccagcataaatactg

SEQ ID NO: 14174 - DNA, 20 bp, synthetic construct
  source 1..20: mol_type = other DNA
acagcgcgttccctcctcgt

SEQ ID NO: 14175 - DNA, 20 bp, synthetic construct
  source 1..20: mol_type = other DNA
cggagcggcggtagttctca

SEQ ID NO: 14176 - DNA, 20 bp, synthetic construct
  source 1..20: mol_type = other DNA
tggccatttctgcaaagatt

SEQ ID NO: 14177 - DNA, 20 bp, synthetic construct
  source 1..20: mol_type = other DNA
ctgtcctgtggaggtgaagc

SEQ ID NO: 14178 - DNA, 20 bp, synthetic construct
  source 1..20: mol_type = other DNA
tccatgccaaaggcctctgc

SEQ ID NO: 14179 - DNA, 20 bp, synthetic construct
  source 1..20: mol_type = other DNA
cccttagccgcttccagaga

SEQ ID NO: 14180 - DNA, 20 bp, synthetic construct
  source 1..20: mol_type = other DNA
agtcagcagcatcaaagcat

SEQ ID NO: 14181 - DNA, 20 bp, synthetic construct
  source 1..20: mol_type = other DNA
aagctcatcagccattgtgg

SEQ ID NO: 14182 - DNA, 20 bp, synthetic construct
  source 1..20: mol_type = other DNA
cagtagaccagcttcatgac

SEQ ID NO: 14183 - DNA, 20 bp, synthetic construct
  source 1..20: mol_type = other DNA
ctcagggcttgtttcaaata

SEQ ID NO: 14184 - DNA, 20 bp, synthetic construct
  source 1..20: mol_type = other DNA
ttactaaggagctagcgaca

SEQ ID NO: 14185 - DNA, 20 bp, synthetic construct
  source 1..20: mol_type = other DNA
accacgttcttctccgataa

SEQ ID NO: 14186 - DNA, 20 bp, synthetic construct
  source 1..20: mol_type = other DNA
cccaaatgttccaccaactc

SEQ ID NO: 14187 - DNA, 20 bp, synthetic construct
  source 1..20: mol_type = other DNA
ctggtgagcctgctggcacg

SEQ ID NO: 14188 - DNA, 20 bp, synthetic construct
  source 1..20: mol_type = other DNA
cagctcctaggctttacgtg

SEQ ID NO: 14189 - DNA, 20 bp, synthetic construct
  source 1..20: mol_type = other DNA
tttgtcaatagcttgggtca

SEQ ID NO: 14190 - DNA, 20 bp, synthetic construct
  source 1..20: mol_type = other DNA
ccacaatgacattggagtct

SEQ ID NO: 14191 - DNA, 20 bp, synthetic construct
  source 1..20: mol_type = other DNA
tctgcaaatgagacactttc

SEQ ID NO: 14192 - DNA, 20 bp, synthetic construct
  source 1..20: mol_type = other DNA
ccgtggctgccacacatggt

SEQ ID NO: 14193 - DNA, 20 bp, synthetic construct
  source 1..20: mol_type = other DNA
agccgattgtgctggagatg

SEQ ID NO: 14194 - DNA, 20 bp, synthetic construct
  source 1..20: mol_type = other DNA
ggacagatccagctcaacca

SEQ ID NO: 14195 - DNA, 20 bp, synthetic construct
  source 1..20: mol_type = other DNA
gagaggcagatgctcaataa

SEQ ID NO: 14196 - DNA, 20 bp, synthetic construct
  source 1..20: mol_type = other DNA
acggtagttttgcttggact

SEQ ID NO: 14197 - DNA, 20 bp, synthetic construct
  source 1..20: mol_type = other DNA
gaccagttctcaacttgaag

SEQ ID NO: 14198 - DNA, 20 bp, synthetic construct
  source 1..20: mol_type = other DNA
ctcacttaaagtcaaggtgc

SEQ ID NO: 14199 - DNA, 20 bp, synthetic construct
  source 1..20: mol_type = other DNA
gtaagtaaagtgccaccagc

SEQ ID NO: 14200 - DNA, 20 bp, synthetic construct
  source 1..20: mol_type = other DNA
ggcatggtccacatctgctc

SEQ ID NO: 14201 - DNA, 20 bp, synthetic construct
  source 1..20: mol_type = other DNA
ctggaaaagatctttgcaac

SEQ ID NO: 14202 - DNA, 20 bp, synthetic construct
  source 1..20: mol_type = other DNA
cagctgtatgactttcagcc

SEQ ID NO: 14203 - DNA, 20 bp, synthetic construct
  source 1..20: mol_type = other DNA
gcttgatagtgcagttgtca

SEQ ID NO: 14204 - DNA, 20 bp, synthetic construct
  source 1..20: mol_type = other DNA
ttattgatccctgggttaac

SEQ ID NO: 14205 - DNA, 20 bp, synthetic construct
  source 1..20: mol_type = other DNA
atgtggttacagggaagcca

SEQ ID NO: 14206 - DNA, 20 bp, synthetic construct
  source 1..20: mol_type = other DNA
catcttctggatgtcatctt

SEQ ID NO: 14207 - DNA, 20 bp, synthetic construct
  source 1..20: mol_type = other DNA
gtctgcgttctctttctcca

SEQ ID NO: 14208 - DNA, 20 bp, synthetic construct
  source 1..20: mol_type = other DNA
attcatcaactactcgacca

SEQ ID NO: 14209 - DNA, 20 bp, synthetic construct
  source 1..20: mol_type = other DNA
tgccaccactcctcgtgaaa

SEQ ID NO: 14210 - DNA, 20 bp, synthetic construct
  source 1..20: mol_type = other DNA
tgtctgagtgtggttgtaat

SEQ ID NO: 14211 - DNA, 20 bp, synthetic construct
  source 1..20: mol_type = other DNA
ggacaggcagtgcaacgtcc

SEQ ID NO: 14212 - DNA, 20 bp, synthetic construct
  source 1..20: mol_type = other DNA
ggaacgtagttatcgtaagg

SEQ ID NO: 14213 - DNA, 20 bp, synthetic construct
  source 1..20: mol_type = other DNA
aacagcacgtcatccttata

SEQ ID NO: 14214 - DNA, 20 bp, synthetic construct
  source 1..20: mol_type = other DNA
ttgtcggagacgcggatgcc

SEQ ID NO: 14215 - DNA, 20 bp, synthetic construct
  source 1..20: mol_type = other DNA
agtcgatgagcttgagctcg

SEQ ID NO: 14216 - DNA, 20 bp, synthetic construct
  source 1..20: mol_type = other DNA
ctggagggtcttctgcaggg

SEQ ID NO: 14217 - DNA, 20 bp, synthetic construct
  source 1..20: mol_type = other DNA
aggtgaaggcagtaatgatg

SEQ ID NO: 14218 - DNA, 20 bp, synthetic construct
  source 1..20: mol_type = other DNA
ttgatgatctcgcggaatat

SEQ ID NO: 14219 - DNA, 20 bp, synthetic construct
  source 1..20: mol_type = other DNA
taaggagaccactttgattg

SEQ ID NO: 14220 - DNA, 20 bp, synthetic construct
  source 1..20: mol_type = other DNA
gagcagagttcagtgtgcat

SEQ ID NO: 14221 - DNA, 20 bp, synthetic construct
  source 1..20: mol_type = other DNA
cctacatagaattgcctacc

SEQ ID NO: 14222 - DNA, 20 bp, synthetic construct
  source 1..20: mol_type = other DNA
agggtgtccagtcaatttgt

SEQ ID NO: 14223 - DNA, 20 bp, synthetic construct
  source 1..20: mol_type = other DNA
ttttcccttcttcgtgcatg

SEQ ID NO: 14224 - DNA, 20 bp, synthetic construct
  source 1..20: mol_type = other DNA
gcgggacttctcctctcaca

SEQ ID NO: 14225 - DNA, 20 bp, synthetic construct
  source 1..20: mol_type = other DNA
gacgtgggaatagccgtcag

SEQ ID NO: 14226 - DNA, 20 bp, synthetic construct
  source 1..20: mol_type = other DNA
acccgcaggatcttccagcc

SEQ ID NO: 14227 - DNA, 20 bp, synthetic construct
  source 1..20: mol_type = other DNA
tccgtaagcatttccgaagc

SEQ ID NO: 14228 - DNA, 20 bp, synthetic construct
  source 1..20: mol_type = other DNA
atccttcaggacaggcgaac

SEQ ID NO: 14229 - DNA, 20 bp, synthetic construct
  source 1..20: mol_type = other DNA
actgctcctccaacatttgt

SEQ ID NO: 14230 - DNA, 20 bp, synthetic construct
  source 1..20: mol_type = other DNA
atgcagcttagcactctgta

SEQ ID NO: 14231 - DNA, 20 bp, synthetic construct
  source 1..20: mol_type = other DNA
aggcaagggcagaatgtaca

SEQ ID NO: 14232 - DNA, 20 bp, synthetic construct
  source 1..20: mol_type = other DNA
ggaagtggaaaaccgtgtcc

SEQ ID NO: 14233 - DNA, 20 bp, synthetic construct
  source 1..20: mol_type = other DNA
tggcgatgcattttaagctc

SEQ ID NO: 14234 - DNA, 20 bp, synthetic construct
  source 1..20: mol_type = other DNA
tacgtgccagatttcaggca

SEQ ID NO: 14235 - DNA, 20 bp, synthetic construct
  source 1..20: mol_type = other DNA
gaccatcttcacaaatgttc

SEQ ID NO: 14236 - DNA, 20 bp, synthetic construct
  source 1..20: mol_type = other DNA
atagtgattctgtagctggc

SEQ ID NO: 14237 - DNA, 20 bp, synthetic construct
  source 1..20: mol_type = other DNA
tgttgtatttgctggtgaag

SEQ ID NO: 14238 - DNA, 20 bp, synthetic construct
  source 1..20: mol_type = other DNA
acgcggagccggtagtctag

SEQ ID NO: 14239 - DNA, 20 bp, synthetic construct
  source 1..20: mol_type = other DNA
gaagtcatgctcaaacatct

SEQ ID NO: 14240 - DNA, 20 bp, synthetic construct
  source 1..20: mol_type = other DNA
agcgcatgggttactattaa

SEQ ID NO: 14241 - DNA, 20 bp, synthetic construct
  source 1..20: mol_type = other DNA
cagccacactttcatattgc

SEQ ID NO: 14242 - DNA, 20 bp, synthetic construct
  source 1..20: mol_type = other DNA
tcatgcatgatggcaccata

SEQ ID NO: 14243 - DNA, 20 bp, synthetic construct
  source 1..20: mol_type = other DNA
ctcggcagaacttgacaatg

SEQ ID NO: 14244 - DNA, 20 bp, synthetic construct
  source 1..20: mol_type = other DNA
tgcaagtccaatgacgaaaa

SEQ ID NO: 14245 - DNA, 20 bp, synthetic construct
  source 1..20: mol_type = other DNA
cggatgcaagtctggccaac

SEQ ID NO: 14246 - DNA, 20 bp, synthetic construct
  source 1..20: mol_type = other DNA
ttttggactgcacttcgcgg

SEQ ID NO: 14247 - DNA, 20 bp, synthetic construct
  source 1..20: mol_type = other DNA
gtgcgagcttcagtttgaga

SEQ ID NO: 14248 - DNA, 20 bp, synthetic construct
  source 1..20: mol_type = other DNA
gagtcatacaggaaatcctg

SEQ ID NO: 14249 - DNA, 20 bp, synthetic construct
  source 1..20: mol_type = other DNA
acccatttcttctctgggtt

SEQ ID NO: 14250 - DNA, 20 bp, synthetic construct
  source 1..20: mol_type = other DNA
cgagaacgagatgtggacag

SEQ ID NO: 14251 - DNA, 20 bp, synthetic construct
  source 1..20: mol_type = other DNA
tgaatgcgtgagccctttgc

SEQ ID NO: 14252 - DNA, 20 bp, synthetic construct
  source 1..20: mol_type = other DNA
aatgccgtcaaggttcttca

SEQ ID NO: 14253 - DNA, 20 bp, synthetic construct
  source 1..20: mol_type = other DNA
ccagtggatcgggtgtaaac

SEQ ID NO: 14254 - DNA, 20 bp, synthetic construct
  source 1..20: mol_type = other DNA
tttgtagtcctgctgcgatt

SEQ ID NO: 14255 - DNA, 20 bp, synthetic construct
  source 1..20: mol_type = other DNA
gggattaatgcccttatagc

SEQ ID NO: 14256 - DNA, 20 bp, synthetic construct
  source 1..20: mol_type = other DNA
gccatcagtccgcgttcgcc

SEQ ID NO: 14257 - DNA, 20 bp, synthetic construct
  source 1..20: mol_type = other DNA
aacgccctgtcgcccacgac

SEQ ID NO: 14258 - DNA, 20 bp, synthetic construct
  source 1..20: mol_type = other DNA
caaggatcccgactgcaata

SEQ ID NO: 14259 - DNA, 20 bp, synthetic construct
  source 1..20: mol_type = other DNA
ttggacactgaacattgtcc

SEQ ID NO: 14260 - DNA, 20 bp, synthetic construct
  source 1..20: mol_type = other DNA
gccacggtgacaataatact

SEQ ID NO: 14261 - DNA, 20 bp, synthetic construct
  source 1..20: mol_type = other DNA
gagacccaagagaaatcggg

SEQ ID NO: 14262 - DNA, 20 bp, synthetic construct
  source 1..20: mol_type = other DNA
ttcactgagcctatcatatg

SEQ ID NO: 14263 - DNA, 20 bp, synthetic construct
  source 1..20: mol_type = other DNA
gaacaaggcagtgagaatga

SEQ ID NO: 14264 - DNA, 20 bp, synthetic construct
  source 1..20: mol_type = other DNA
cagggcctgcatgtgaaggg

SEQ ID NO: 14265 - DNA, 20 bp, synthetic construct
  source 1..20: mol_type = other DNA
ctgggatgaccaattcagct

SEQ ID NO: 14266 - DNA, 20 bp, synthetic construct
  source 1..20: mol_type = other DNA
taaatactgtcccgttccaa

SEQ ID NO: 14267 - DNA, 20 bp, synthetic construct
  source 1..20: mol_type = other DNA
ctgagacgaccgagcggtca

SEQ ID NO: 14268 - DNA, 20 bp, synthetic construct
  source 1..20: mol_type = other DNA
ggccactgttactagcaagc

SEQ ID NO: 14269 - DNA, 20 bp, synthetic construct
  source 1..20: mol_type = other DNA
gcattcacatgacacagaac

SEQ ID NO: 14270 - DNA, 20 bp, synthetic construct
  source 1..20: mol_type = other DNA
acatggaaagctcatcttag

SEQ ID NO: 14271 - DNA, 20 bp, synthetic construct
  source 1..20: mol_type = other DNA
ccaatcacttgatttatcgc

SEQ ID NO: 14272 - DNA, 20 bp, synthetic construct
  source 1..20: mol_type = other DNA
agtgcacctttcatgtgcaa

SEQ ID NO: 14273 - DNA, 20 bp, synthetic construct
  source 1..20: mol_type = other DNA
gttctaagtagccaatccta

SEQ ID NO: 14274 - DNA, 20 bp, synthetic construct
  source 1..20: mol_type = other DNA
caggcagatgccctgagtca

SEQ ID NO: 14275 - DNA, 20 bp, synthetic construct
  source 1..20: mol_type = other DNA
tcttatgcctcctgttaact

SEQ ID NO: 14276 - DNA, 20 bp, synthetic construct
  source 1..20: mol_type = other DNA
gtcaaagattttactgcggg

SEQ ID NO: 14277 - DNA, 20 bp, synthetic construct
  source 1..20: mol_type = other DNA
cgtggacatggcactaaaca

SEQ ID NO: 14278 - DNA, 20 bp, synthetic construct
  source 1..20: mol_type = other DNA
tgatagacctggtcattcct

SEQ ID NO: 14279 - DNA, 20 bp, synthetic construct
  source 1..20: mol_type = other DNA
agcccagtttcctccaaggt

SEQ ID NO: 14280 - DNA, 20 bp, synthetic construct
  source 1..20: mol_type = other DNA
caggtagagataaaagttcg

SEQ ID NO: 14281 - DNA, 20 bp, synthetic construct
  source 1..20: mol_type = other DNA
gcccgactgcatctttgttt

SEQ ID NO: 14282 - DNA, 20 bp, synthetic construct
  source 1..20: mol_type = other DNA
tatttgcagctctgagtaag

SEQ ID NO: 14283 - DNA, 20 bp, synthetic construct
  source 1..20: mol_type = other DNA
ataggaacccagagtcaacc

SEQ ID NO: 14284 - DNA, 20 bp, synthetic construct
  source 1..20: mol_type = other DNA
catcatcagtagggttgctg

SEQ ID NO: 14285 - DNA, 20 bp, synthetic construct
  source 1..20: mol_type = other DNA
caagaatcaaagccaaggcc

SEQ ID NO: 14286 - DNA, 20 bp, synthetic construct
  source 1..20: mol_type = other DNA
gagctaagatactcaaacct

SEQ ID NO: 14287 - DNA, 20 bp, synthetic construct
  source 1..20: mol_type = other DNA
tgcccgctgcttctcaaaca

SEQ ID NO: 14288 - DNA, 20 bp, synthetic construct
  source 1..20: mol_type = other DNA
caccaggttcacttcctgat

SEQ ID NO: 14289 - DNA, 20 bp, synthetic construct
  source 1..20: mol_type = other DNA
cagtgtgcagtccatattaa

SEQ ID NO: 14290 - DNA, 20 bp, synthetic construct
  source 1..20: mol_type = other DNA
aattctttcactgaagtgcc

SEQ ID NO: 14291 - DNA, 20 bp, synthetic construct
  source 1..20: mol_type = other DNA
ctatggtctccatggtgttc

SEQ ID NO: 14292 - DNA, 20 bp, synthetic construct
  source 1..20: mol_type = other DNA
gaggctgctacaatcagctc

SEQ ID NO: 14293 - DNA, 20 bp, synthetic construct
  source 1..20: mol_type = other DNA
tgaaatccagtttgctgcta

SEQ ID NO: 14294 - DNA, 20 bp, synthetic construct
  source 1..20: mol_type = other DNA
gtcacttcagccaggtgttc

SEQ ID NO: 14295 - DNA, 20 bp, synthetic construct
  source 1..20: mol_type = other DNA
actgttggaagtacagctgt

SEQ ID NO: 14296 - DNA, 20 bp, synthetic construct
  source 1..20: mol_type = other DNA
gtgggctttttgtgatggat

SEQ ID NO: 14297 - DNA, 20 bp, synthetic construct
  source 1..20: mol_type = other DNA
gccggcccggagcctgattt

SEQ ID NO: 14298 - DNA, 20 bp, synthetic construct
  source 1..20: mol_type = other DNA
ctcagcatgattctgagaac

SEQ ID NO: 14299 - DNA, 20 bp, synthetic construct
  source 1..20: mol_type = other DNA
tggaatgtgccattgacaga

SEQ ID NO: 14300 - DNA, 20 bp, synthetic construct
  source 1..20: mol_type = other DNA
cgtgctgcagttagacgaaa

SEQ ID NO: 14301 - DNA, 20 bp, synthetic construct
  source 1..20: mol_type = other DNA
ctctgttctgaatccaattg

SEQ ID NO: 14302 - DNA, 20 bp, synthetic construct
  source 1..20: mol_type = other DNA
catccttcaccagtttatag

SEQ ID NO: 14303 - DNA, 20 bp, synthetic construct
  source 1..20: mol_type = other DNA
acgtcgctctgaaccgtgta

SEQ ID NO: 14304 - DNA, 20 bp, synthetic construct
  source 1..20: mol_type = other DNA
cacgcaatcaagcactgcta

SEQ ID NO: 14305 - DNA, 20 bp, synthetic construct
  source 1..20: mol_type = other DNA
cttccttgcaaaccattgaa

SEQ ID NO: 14306 - DNA, 20 bp, synthetic construct
  source 1..20: mol_type = other DNA
tgcagcctttgtttccatat

SEQ ID NO: 14307 - DNA, 20 bp, synthetic construct
  source 1..20: mol_type = other DNA
gattgcgcgtttgccgcatg

SEQ ID NO: 14308 - DNA, 20 bp, synthetic construct
  source 1..20: mol_type = other DNA
ggaagagccagaacaaagtg

SEQ ID NO: 14309 - DNA, 20 bp, synthetic construct
  source 1..20: mol_type = other DNA
tctcagtttggtggcggtgg

SEQ ID NO: 14310 - DNA, 20 bp, synthetic construct
  source 1..20: mol_type = other DNA
cgccctgaatccagcgtcct

SEQ ID NO: 14311 - DNA, 20 bp, synthetic construct
  source 1..20: mol_type = other DNA
gacgagggtgcaggatccca

SEQ ID NO: 14312 - DNA, 20 bp, synthetic construct
  source 1..20: mol_type = other DNA
caccaccagcgcgtagtagg

SEQ ID NO: 14313 - DNA, 20 bp, synthetic construct
  source 1..20: mol_type = other DNA
tgggcattaacacttttgga

SEQ ID NO: 14314 - DNA, 20 bp, synthetic construct
  source 1..20: mol_type = other DNA
ggaatcacaggactcgattt

SEQ ID NO: 14315 - DNA, 20 bp, synthetic construct
  source 1..20: mol_type = other DNA
cagggcaatgacataaattg

SEQ ID NO: 14316 - DNA, 20 bp, synthetic construct
  source 1..20: mol_type = other DNA
tactctgtaaccagtaacag

SEQ ID NO: 14317 - DNA, 20 bp, synthetic construct
  source 1..20: mol_type = other DNA
gcgtggcgtaggtgaaaggg

SEQ ID NO: 14318 - DNA, 20 bp, synthetic construct
  source 1..20: mol_type = other DNA
gtagggcgggacgtggttgc

SEQ ID NO: 14319 - DNA, 20 bp, synthetic construct
  source 1..20: mol_type = other DNA
gctcggtcagattgcgttgc

SEQ ID NO: 14320 - DNA, 20 bp, synthetic construct
  source 1..20: mol_type = other DNA
tcatgaaatttctgcagacg

SEQ ID NO: 14321 - DNA, 20 bp, synthetic construct
  source 1..20: mol_type = other DNA
gcacaatcctagacagtgta

SEQ ID NO: 14322 - DNA, 20 bp, synthetic construct
  source 1..20: mol_type = other DNA
agcgcagttatcctacacaa

SEQ ID NO: 14323 - DNA, 20 bp, synthetic construct
  source 1..20: mol_type = other DNA
gcggtcaatactcaggcagg

SEQ ID NO: 14324 - DNA, 20 bp, synthetic construct
  source 1..20: mol_type = other DNA
gaggcttccagcacaaacca

SEQ ID NO: 14325 - DNA, 20 bp, synthetic construct
  source 1..20: mol_type = other DNA
caccctgcaacttggcacat

SEQ ID NO: 14326 - DNA, 20 bp, synthetic construct
  source 1..20: mol_type = other DNA
gggcttagtttgcttcctgt

SEQ ID NO: 14327 - DNA, 20 bp, synthetic construct
  source 1..20: mol_type = other DNA
ctgtaattgccatggaagag

SEQ ID NO: 14328 - DNA, 20 bp, synthetic construct
  source 1..20: mol_type = other DNA
cagttctagagatctgcact

SEQ ID NO: 14329 - DNA, 20 bp, synthetic construct
  source 1..20: mol_type = other DNA
tcagaacacctccacaaacg

SEQ ID NO: 14330 - DNA, 20 bp, synthetic construct
  source 1..20: mol_type = other DNA
gtcccgtaagtcattggcca

SEQ ID NO: 14331 - DNA, 20 bp, synthetic construct
  source 1..20: mol_type = other DNA
gcattgcaaagcgacaaccc

SEQ ID NO: 14332 - DNA, 20 bp, synthetic construct
  source 1..20: mol_type = other DNA
cattgcttttgcgcaatccc

SEQ ID NO: 14333 - DNA, 20 bp, synthetic construct
  source 1..20: mol_type = other DNA
tatgaaacagatgaggacgt

SEQ ID NO: 14334 - DNA, 20 bp, synthetic construct
  source 1..20: mol_type = other DNA
ggtgaaacacttgaagggct

SEQ ID NO: 14335 - DNA, 20 bp, synthetic construct
  source 1..20: mol_type = other DNA
aagttctgtctgacatgcca

SEQ ID NO: 14336 - DNA, 20 bp, synthetic construct
  source 1..20: mol_type = other DNA
acagtcacagttgtcaacaa

SEQ ID NO: 14337 - DNA, 20 bp, synthetic construct
  source 1..20: mol_type = other DNA
gtgtgctggaccacgcattt

SEQ ID NO: 14338 - DNA, 20 bp, synthetic construct
  source 1..20: mol_type = other DNA
ctctttgatggtcagtgtgc

SEQ ID NO: 14339 - DNA, 20 bp, synthetic construct
  source 1..20: mol_type = other DNA
ttatttcagggcaacaagcg

SEQ ID NO: 14340 - DNA, 20 bp, synthetic construct
  source 1..20: mol_type = other DNA
cagagctttgtgttcaaggc

SEQ ID NO: 14341 - DNA, 20 bp, synthetic construct
  source 1..20: mol_type = other DNA
ttcatagcaggtactttcag

SEQ ID NO: 14342 - DNA, 20 bp, synthetic construct
  source 1..20: mol_type = other DNA
gggagttcacatgcgccttg

SEQ ID NO: 14343 - DNA, 20 bp, synthetic construct
  source 1..20: mol_type = other DNA
gtgcatgccttcttttgcaa

SEQ ID NO: 14344 - DNA, 20 bp, synthetic construct
  source 1..20: mol_type = other DNA
ttcagatctcatatcttggc

SEQ ID NO: 14345 - DNA, 20 bp, synthetic construct
  source 1..20: mol_type = other DNA
cagcgttgatgcagcccaag

SEQ ID NO: 14346 - DNA, 20 bp, synthetic construct
  source 1..20: mol_type = other DNA
tttcaacacgcaggacaggt

SEQ ID NO: 14347 - DNA, 20 bp, synthetic construct
  source 1..20: mol_type = other DNA
tgtagacaacaggaaagtcc

SEQ ID NO: 14348 - DNA, 20 bp, synthetic construct
  source 1..20: mol_type = other DNA
ttgacattggttgtcccagg

SEQ ID NO: 14349 - DNA, 20 bp, synthetic construct
  source 1..20: mol_type = other DNA
tgtcacccttgtgggtccat

SEQ ID NO: 14350 - DNA, 20 bp, synthetic construct
  source 1..20: mol_type = other DNA
cagggtcttcctctgagtag

SEQ ID NO: 14351 - DNA, 20 bp, synthetic construct
  source 1..20: mol_type = other DNA
cctgcagttgatcagcaagt

SEQ ID NO: 14352 - DNA, 20 bp, synthetic construct
  source 1..20: mol_type = other DNA
tggcttgttcctcactactc

SEQ ID NO: 14353 - DNA, 20 bp, synthetic construct
  source 1..20: mol_type = other DNA
tgttttcatccttttcctgg

SEQ ID NO: 14354 - DNA, 20 bp, synthetic construct
  source 1..20: mol_type = other DNA
tcctctgagatcatggacgg

SEQ ID NO: 14355 - DNA, 20 bp, synthetic construct
  source 1..20: mol_type = other DNA
agggagttcatggcacagcg

SEQ ID NO: 14356 - DNA, 20 bp, synthetic construct
  source 1..20: mol_type = other DNA
cagcagggtgaacacggaat

SEQ ID NO: 14357 - DNA, 20 bp, synthetic construct
  source 1..20: mol_type = other DNA
ctggatgccaaagaacggga

SEQ ID NO: 14358 - DNA, 20 bp, synthetic construct
  source 1..20: mol_type = other DNA
ctcccaagcaggttcttaga

SEQ ID NO: 14359 - DNA, 20 bp, synthetic construct
  source 1..20: mol_type = other DNA
actacactcaacacgccgcg

SEQ ID NO: 14360 - DNA, 20 bp, synthetic construct
  source 1..20: mol_type = other DNA
gtctgaaactggttggagtt

SEQ ID NO: 14361 - DNA, 20 bp, synthetic construct
  source 1..20: mol_type = other DNA
tgcagtcagcaatgacttaa

SEQ ID NO: 14362 - DNA, 20 bp, synthetic construct
  source 1..20: mol_type = other DNA
ttggagcatgccattcacga

SEQ ID NO: 14363 - DNA, 20 bp, synthetic construct
  source 1..20: mol_type = other DNA
ctccttcggtgccttttaat

SEQ ID NO: 14364 - DNA, 20 bp, synthetic construct
  source 1..20: mol_type = other DNA
gttgctgccaatatattggg

SEQ ID NO: 14365 - DNA, 20 bp, synthetic construct
  source 1..20: mol_type = other DNA
ctgtgttttgaagctgaagc

SEQ ID NO: 14366 - DNA, 20 bp, synthetic construct
  source 1..20: mol_type = other DNA
gaacaacttcctttttggca

SEQ ID NO: 14367 - DNA, 20 bp, synthetic construct
  source 1..20: mol_type = other DNA
cctggctcacatcctctagt

SEQ ID NO: 14368 - DNA, 20 bp, synthetic construct
  source 1..20: mol_type = other DNA
ctcatcagcagcccagttag

SEQ ID NO: 14369 - DNA, 20 bp, synthetic construct
  source 1..20: mol_type = other DNA
acccagaagacgcatgtaaa

SEQ ID NO: 14370 - DNA, 20 bp, synthetic construct
  source 1..20: mol_type = other DNA
tgcttattgtcagtctcttc

SEQ ID NO: 14371 - DNA, 20 bp, synthetic construct
  source 1..20: mol_type = other DNA
ctcaaatctcaagggctgat

SEQ ID NO: 14372 - DNA, 20 bp, synthetic construct
  source 1..20: mol_type = other DNA
cactgcagtacagttgtagt

SEQ ID NO: 14373 - DNA, 20 bp, synthetic construct
  source 1..20: mol_type = other DNA
cttccttggcatcataccac

SEQ ID NO: 14374 - DNA, 20 bp, synthetic construct
  source 1..20: mol_type = other DNA
ctttgttaatccgctcaggg

SEQ ID NO: 14375 - DNA, 20 bp, synthetic construct
  source 1..20: mol_type = other DNA
gcccacagaacagccataat

SEQ ID NO: 14376 - DNA, 20 bp, synthetic construct
  source 1..20: mol_type = other DNA
cattccgctaggaaagacaa

SEQ ID NO: 14377 - DNA, 20 bp, synthetic construct
  source 1..20: mol_type = other DNA
agactggttgtccagagatg

SEQ ID NO: 14378 - DNA, 20 bp, synthetic construct
  source 1..20: mol_type = other DNA
ggactccatatttgaggaga

SEQ ID NO: 14379 - DNA, 20 bp, synthetic construct
  source 1..20: mol_type = other DNA
ttccgtgccgtaggacgcgt

SEQ ID NO: 14380 - DNA, 20 bp, synthetic construct
  source 1..20: mol_type = other DNA
gcggcactccaccgtgtcag

SEQ ID NO: 14381 - DNA, 20 bp, synthetic construct
  source 1..20: mol_type = other DNA
ggcctccatttgtctcaggg

SEQ ID NO: 14382 - DNA, 20 bp, synthetic construct
  source 1..20: mol_type = other DNA
ccgtacagttctctctgagg

SEQ ID NO: 14383 - DNA, 20 bp, synthetic construct
  source 1..20: mol_type = other DNA
tcagtttgaagtgatagcca

SEQ ID NO: 14384 - DNA, 20 bp, synthetic construct
  source 1..20: mol_type = other DNA
gaagatgttccataagtccc

SEQ ID NO: 14385 - DNA, 20 bp, synthetic construct
  source 1..20: mol_type = other DNA
caggtagaaatcttcccaga

SEQ ID NO: 14386 - DNA, 20 bp, synthetic construct
  source 1..20: mol_type = other DNA
ccatagcggtggacccatgt

SEQ ID NO: 14387 - DNA, 20 bp, synthetic construct
  source 1..20: mol_type = other DNA
ccactccactagttcatcat

SEQ ID NO: 14388 - DNA, 20 bp, synthetic construct
  source 1..20: mol_type = other DNA
gctgccgaacttgctgcaga

SEQ ID NO: 14389 - DNA, 20 bp, synthetic construct
  source 1..20: mol_type = other DNA
gaagaatcgttgccatggtt

SEQ ID NO: 14390 - DNA, 20 bp, synthetic construct
  source 1..20: mol_type = other DNA
caggttttctctcaacaccg

SEQ ID NO: 14391 - DNA, 20 bp, synthetic construct
  source 1..20: mol_type = other DNA
ccaggaagtctgcattatca

SEQ ID NO: 14392 - DNA, 20 bp, synthetic construct
  source 1..20: mol_type = other DNA
tagaatccagtcagtgaggc

SEQ ID NO: 14393 - DNA, 20 bp, synthetic construct
  source 1..20: mol_type = other DNA
cctcaacgatatgcagccgg

SEQ ID NO: 14394 - DNA, 20 bp, synthetic construct
  source 1..20: mol_type = other DNA
cctattctcacttctctcca

SEQ ID NO: 14395 - DNA, 20 bp, synthetic construct
  source 1..20: mol_type = other DNA
tggtggagaagacacaggca

SEQ ID NO: 14396 - DNA, 20 bp, synthetic construct
  source 1..20: mol_type = other DNA
tgagaagcaggaaaggccgg

SEQ ID NO: 14397 - DNA, 20 bp, synthetic construct
  source 1..20: mol_type = other DNA
agcccaaaatgctggccatt

SEQ ID NO: 14398 - DNA, 20 bp, synthetic construct
  source 1..20: mol_type = other DNA
ccaagtcagcattacaaatg

SEQ ID NO: 14399 - DNA, 20 bp, synthetic construct
  source 1..20: mol_type = other DNA
gtaggtcactgttgctaatg

SEQ ID NO: 14400 - DNA, 20 bp, synthetic construct
  source 1..20: mol_type = other DNA
tgaatgaaactccaggagta

SEQ ID NO: 14401 - DNA, 20 bp, synthetic construct
  source 1..20: mol_type = other DNA
ccatttctactgagatctag

SEQ ID NO: 14402 - DNA, 20 bp, synthetic construct
  source 1..20: mol_type = other DNA
atcagcccatatgtttctgg

SEQ ID NO: 14403 - DNA, 20 bp, synthetic construct
  source 1..20: mol_type = other DNA
gagtggaaagcaatggtcag

SEQ ID NO: 14404 - DNA, 20 bp, synthetic construct
  source 1..20: mol_type = other DNA
tccacagttagaggacaaaa

SEQ ID NO: 14405 - DNA, 20 bp, synthetic construct
  source 1..20: mol_type = other DNA
tgccggtcggagactcccgt

SEQ ID NO: 14406 - DNA, 20 bp, synthetic construct
  source 1..20: mol_type = other DNA
caacgcagtcgacgtcagcg

SEQ ID NO: 14407 - DNA, 20 bp, synthetic construct
  source 1..20: mol_type = other DNA
tagcaaggatgtggatcaat

SEQ ID NO: 14408 - DNA, 20 bp, synthetic construct
  source 1..20: mol_type = other DNA
tggaccttcttcctctgaat

SEQ ID NO: 14409 - DNA, 20 bp, synthetic construct
  source 1..20: mol_type = other DNA
ttctgtggagtcatccatat

SEQ ID NO: 14410 - DNA, 20 bp, synthetic construct
  source 1..20: mol_type = other DNA
agaaagaaaaaagctagccc

SEQ ID NO: 14411 - DNA, 20 bp, synthetic construct
  source 1..20: mol_type = other DNA
cagactcggcaaagtcgaga

SEQ ID NO: 14412 - DNA, 20 bp, synthetic construct
  source 1..20: mol_type = other DNA
cacacattcctgaatcccag

SEQ ID NO: 14413 - DNA, 20 bp, synthetic construct
  source 1..20: mol_type = other DNA
ccatcttcccaggcatttta

SEQ ID NO: 14414 - DNA, 20 bp, synthetic construct
  source 1..20: mol_type = other DNA
gcaattcttttacagcctgc

SEQ ID NO: 14415 - DNA, 20 bp, synthetic construct
  source 1..20: mol_type = other DNA
gcaaggcaaggctccaatgc

SEQ ID NO: 14416 - DNA, 20 bp, synthetic construct
  source 1..20: mol_type = other DNA
cagggctgggtttgtcggtg

SEQ ID NO: 14417 - DNA, 20 bp, synthetic construct
  source 1..20: mol_type = other DNA
gctgatgacagccactcggt

SEQ ID NO: 14418 - DNA, 20 bp, synthetic construct
  source 1..20: mol_type = other DNA
ggaagcttcctcgcggtgta

SEQ ID NO: 14419 - DNA, 20 bp, synthetic construct
  source 1..20: mol_type = other DNA
gaaagaatgatgctcgagtt

SEQ ID NO: 14420 - DNA, 20 bp, synthetic construct
  source 1..20: mol_type = other DNA
ggttgtgtacatgactcgaa

SEQ ID NO: 14421 - DNA, 20 bp, synthetic construct
  source 1..20: mol_type = other DNA
gaggactcatcgttatatac

SEQ ID NO: 14422 - DNA, 20 bp, synthetic construct
  source 1..20: mol_type = other DNA
gagagttggataagggatct

SEQ ID NO: 14423 - DNA, 20 bp, synthetic construct
  source 1..20: mol_type = other DNA
ggtagccgtttatggatgta

SEQ ID NO: 14424 - DNA, 20 bp, synthetic construct
  source 1..20: mol_type = other DNA
tagcggctgtccacgttttc

SEQ ID NO: 14425 - DNA, 20 bp, synthetic construct
  source 1..20: mol_type = other DNA
ctcaggccggtcagtgtgca

SEQ ID NO: 14426 - DNA, 20 bp, synthetic construct
  source 1..20: mol_type = other DNA
cagttgaacttgacctcagg

SEQ ID NO: 14427 - DNA, 20 bp, synthetic construct
  source 1..20: mol_type = other DNA
aggaaggccgtctgagtgag

SEQ ID NO: 14428 - DNA, 20 bp, synthetic construct
  source 1..20: mol_type = other DNA
cttttgactactggacatct

SEQ ID NO: 14429 - DNA, 20 bp, synthetic construct
  source 1..20: mol_type = other DNA
ttctatggtttggtcctgtg

SEQ ID NO: 14430 - DNA, 20 bp, synthetic construct
  source 1..20: mol_type = other DNA
ctccttacgagcaggtacaa

SEQ ID NO: 14431 - DNA, 20 bp, synthetic construct
  source 1..20: mol_type = other DNA
ggctgcacggtcaccaggtt

SEQ ID NO: 14432 - DNA, 20 bp, synthetic construct
  source 1..20: mol_type = other DNA
aagctggcgcgcaagagacc

SEQ ID NO: 14433 - DNA, 20 bp, synthetic construct
  source 1..20: mol_type = other DNA
ctttgttcttggtctcagtg

SEQ ID NO: 14434 - DNA, 20 bp, synthetic construct
  source 1..20: mol_type = other DNA
ctcactgggtgccatcgtaa

SEQ ID NO: 14435 - DNA, 20 bp, synthetic construct
  source 1..20: mol_type = other DNA
agtagtagcagctgatttgg

SEQ ID NO: 14436 - DNA, 20 bp, synthetic construct
  source 1..20: mol_type = other DNA
tgacatatactccatgtagg

SEQ ID NO: 14437 - DNA, 20 bp, synthetic construct
  source 1..20: mol_type = other DNA
tgattataagccttgcttgc

SEQ ID NO: 14438 - DNA, 20 bp, synthetic construct
  source 1..20: mol_type = other DNA
gtttttggtcctttcaccca

SEQ ID NO: 14439 - DNA, 20 bp, synthetic construct
  source 1..20: mol_type = other DNA
ggacttaattctcctccgta

SEQ ID NO: 14440 - DNA, 20 bp, synthetic construct
  source 1..20: mol_type = other DNA
ttccttcacatctgctgaat

SEQ ID NO: 14441 - DNA, 20 bp, synthetic construct
  source 1..20: mol_type = other DNA
tccggcctcacaagcccgag

SEQ ID NO: 14442 - DNA, 20 bp, synthetic construct
  source 1..20: mol_type = other DNA
gtgaccgacttggccacgtc

SEQ ID NO: 14443 - DNA, 20 bp, synthetic construct
  source 1..20: mol_type = other DNA
atcccaatgtagtaaggcag

SEQ ID NO: 14444 - DNA, 20 bp, synthetic construct
  source 1..20: mol_type = other DNA
acaataccaggcaggataag

SEQ ID NO: 14445 - DNA, 20 bp, synthetic construct
  source 1..20: mol_type = other DNA
aaaaaagggacgtcttaggg

SEQ ID NO: 14446 - DNA, 20 bp, synthetic construct
  source 1..20: mol_type = other DNA
gggcctggcagaatgtctgt

SEQ ID NO: 14447 - DNA, 20 bp, synthetic construct
  source 1..20: mol_type = other DNA
agcttgctcatgaagcaagg

SEQ ID NO: 14448 - DNA, 20 bp, synthetic construct
  source 1..20: mol_type = other DNA
gaccagacaagtgcatataa

SEQ ID NO: 14449 - DNA, 20 bp, synthetic construct
  source 1..20: mol_type = other DNA
tgatctgcaggttttccaaa

SEQ ID NO: 14450 - DNA, 20 bp, synthetic construct
  source 1..20: mol_type = other DNA
ttttggttttctgaccggag

SEQ ID NO: 14451 - DNA, 20 bp, synthetic construct
  source 1..20: mol_type = other DNA
ccttacacgcttgcttgctc

SEQ ID NO: 14452 - DNA, 20 bp, synthetic construct
  source 1..20: mol_type = other DNA
cttcgacacaaatgtacatc

SEQ ID NO: 14453 - DNA, 20 bp, synthetic construct
  source 1..20: mol_type = other DNA
tctcgctagacacggttcgg

SEQ ID NO: 14454 - DNA, 20 bp, synthetic construct
  source 1..20: mol_type = other DNA
gatgttagcgttcagtcgag

SEQ ID NO: 14455 - DNA, 20 bp, synthetic construct
  source 1..20: mol_type = other DNA
caacgactacgtacgtagca

SEQ ID NO: 14456 - DNA, 20 bp, synthetic construct
  source 1..20: mol_type = other DNA
gtcccaattttcgctaaccc

SEQ ID NO: 14457 - DNA, 20 bp, synthetic construct
  source 1..20: mol_type = other DNA
cctgcagcgtaattaataag

SEQ ID NO: 14458 - DNA, 20 bp, synthetic construct
  source 1..20: mol_type = other DNA
ccggcagttgctccattaaa

SEQ ID NO: 14459 - DNA, 20 bp, synthetic construct
  source 1..20: mol_type = other DNA
cctgctaacctgcatcagcc

SEQ ID NO: 14460 - DNA, 20 bp, synthetic construct
  source 1..20: mol_type = other DNA
tggcctgtactaaattgact

SEQ ID NO: 14461 - DNA, 20 bp, synthetic construct
  source 1..20: mol_type = other DNA
ttgacttcggctgatagaca

SEQ ID NO: 14462 - DNA, 20 bp, synthetic construct
  source 1..20: mol_type = other DNA
gaggccaccagaaaataaac

SEQ ID NO: 14463 - DNA, 20 bp, synthetic construct
  source 1..20: mol_type = other DNA
ggtactcaaggagacaatgg

SEQ ID NO: 14464 - DNA, 20 bp, synthetic construct
  source 1..20: mol_type = other DNA
ctccaaagagaacatgtacc

SEQ ID NO: 14465 - DNA, 20 bp, synthetic construct
  source 1..20: mol_type = other DNA
gctgcttattttgccggctg

SEQ ID NO: 14466 - DNA, 20 bp, synthetic construct
  source 1..20: mol_type = other DNA
ggcttccacatcagttaact

SEQ ID NO: 14467 - DNA, 20 bp, synthetic construct
  source 1..20: mol_type = other DNA
tccaaagagaaatctcacga

SEQ ID NO: 14468 - DNA, 20 bp, synthetic construct
  source 1..20: mol_type = other DNA
atatggagctaagttagctc

SEQ ID NO: 14469 - DNA, 20 bp, synthetic construct
  source 1..20: mol_type = other DNA
taggcctggccaaatcattg

SEQ ID NO: 14470 - DNA, 20 bp, synthetic construct
  source 1..20: mol_type = other DNA
gccctgatatagggacgatt

SEQ ID NO: 14471 - DNA, 20 bp, synthetic construct
  source 1..20: mol_type = other DNA
gctcgagggcttttcctgcc

SEQ ID NO: 14472 - DNA, 20 bp, synthetic construct
  source 1..20: mol_type = other DNA
gctcagtttcttcttcaatc

SEQ ID NO: 14473 - DNA, 20 bp, synthetic construct
  source 1..20: mol_type = other DNA
gataaaacagaccaactgtg

SEQ ID NO: 14474 - DNA, 20 bp, synthetic construct
  source 1..20: mol_type = other DNA
ggtcatagcgccggccaaag

SEQ ID NO: 14475 - DNA, 20 bp, synthetic construct
  source 1..20: mol_type = other DNA
tgggtaggtagcgaagaata

SEQ ID NO: 14476 - DNA, 20 bp, synthetic construct
  source 1..20: mol_type = other DNA
gtaggactggatctggtgtc

SEQ ID NO: 14477 - DNA, 20 bp, synthetic construct
  source 1..20: mol_type = other DNA
tcaccactccttttggcttt

SEQ ID NO: 14478 - DNA, 20 bp, synthetic construct
  source 1..20: mol_type = other DNA
aggccttgcttgcggacgcc

SEQ ID NO: 14479 - DNA, 20 bp, synthetic construct
  source 1..20: mol_type = other DNA
gaggaggaaagatagcgcca

SEQ ID NO: 14480 - DNA, 20 bp, synthetic construct
  source 1..20: mol_type = other DNA
ttcctcattacgggagaccc

SEQ ID NO: 14481 - DNA, 20 bp, synthetic construct
  source 1..20: mol_type = other DNA
tgttggctgtgtgttgaaca

SEQ ID NO: 14482 - DNA, 20 bp, synthetic construct
  source 1..20: mol_type = other DNA
tccttagatggcaagtaaca

SEQ ID NO: 14483 - DNA, 20 bp, synthetic construct
  source 1..20: mol_type = other DNA
tttggattccgtagcatatg

SEQ ID NO: 14484 - DNA, 20 bp, synthetic construct
  source 1..20: mol_type = other DNA
gacaaggaaaacccttctgg

SEQ ID NO: 14485 - DNA, 20 bp, synthetic construct
  source 1..20: mol_type = other DNA
ccacctcatagccttcattg

SEQ ID NO: 14486 - DNA, 20 bp, synthetic construct
  source 1..20: mol_type = other DNA
caccaagcaggttgatgatg

SEQ ID NO: 14487 - DNA, 20 bp, synthetic construct
  source 1..20: mol_type = other DNA
actatcacttcctctaaggg

SEQ ID NO: 14488 - DNA, 20 bp, synthetic construct
  source 1..20: mol_type = other DNA
ggcaccgcggtagtacaggc

SEQ ID NO: 14489 - DNA, 20 bp, synthetic construct
  source 1..20: mol_type = other DNA
tttcaggcgattacaagggc

SEQ ID NO: 14490 - DNA, 20 bp, synthetic construct
  source 1..20: mol_type = other DNA
cagacggactttctgcggcg

SEQ ID NO: 14491 - DNA, 20 bp, synthetic construct
  source 1..20: mol_type = other DNA
tctggtgtagtataatcagg

SEQ ID NO: 14492 - DNA, 20 bp, synthetic construct
  source 1..20: mol_type = other DNA
ccattattggccttagatcc

SEQ ID NO: 14493 - DNA, 20 bp, synthetic construct
  source 1..20: mol_type = other DNA
ggtctggaaagcgtcaatta

SEQ ID NO: 14494 - DNA, 20 bp, synthetic construct
  source 1..20: mol_type = other DNA
ctccatccagttgataaacc

SEQ ID NO: 14495 - DNA, 20 bp, synthetic construct
  source 1..20: mol_type = other DNA
cactatcagccagttcgttg

SEQ ID NO: 14496 - DNA, 20 bp, synthetic construct
  source 1..20: mol_type = other DNA
gtctggctatctgattgaag

SEQ ID NO: 14497 - DNA, 20 bp, synthetic construct
  source 1..20: mol_type = other DNA
gatcactacttaggcgcttt

SEQ ID NO: 14498 - DNA, 20 bp, synthetic construct
  source 1..20: mol_type = other DNA
ctccgtccctgcagttccta

SEQ ID NO: 14499 - DNA, 20 bp, synthetic construct
  source 1..20: mol_type = other DNA
cagtgaacctccgactgtat

SEQ ID NO: 14500 - DNA, 20 bp, synthetic construct
  source 1..20: mol_type = other DNA
gctgttgatattgagacaac

SEQ ID NO: 14501 - DNA, 20 bp, synthetic construct
  source 1..20: mol_type = other DNA
aggtttttccagtgttttcc

SEQ ID NO: 14502 - DNA, 20 bp, synthetic construct
  source 1..20: mol_type = other DNA
ttgagctcaacttccgggta

SEQ ID NO: 14503 - DNA, 20 bp, synthetic construct
  source 1..20: mol_type = other DNA
ttctagggaggagtaagtgt

SEQ ID NO: 14504 - DNA, 20 bp, synthetic construct
  source 1..20: mol_type = other DNA
tcttagttgacatttcggcc

SEQ ID NO: 14505 - DNA, 20 bp, synthetic construct
  source 1..20: mol_type = other DNA
ggagcaaaacaccaaagaag

SEQ ID NO: 14506 - DNA, 20 bp, synthetic construct
  source 1..20: mol_type = other DNA
atgacgtccaggtctaaata

SEQ ID NO: 14507 - DNA, 20 bp, synthetic construct
  source 1..20: mol_type = other DNA
cctccagctggcgcagcttc

SEQ ID NO: 14508 - DNA, 20 bp, synthetic construct
  source 1..20: mol_type = other DNA
agctccatttttcagggcaa

SEQ ID NO: 14509 - DNA, 20 bp, synthetic construct
  source 1..20: mol_type = other DNA
ttcccgccaattattatggt

SEQ ID NO: 14510 - DNA, 20 bp, synthetic construct
  source 1..20: mol_type = other DNA
ttcatttggaaggatagagg

SEQ ID NO: 14511 - DNA, 20 bp, synthetic construct
  source 1..20: mol_type = other DNA
ctgtcctcaaagataccaga

SEQ ID NO: 14512 - DNA, 20 bp, synthetic construct
  source 1..20: mol_type = other DNA
aggacaccggctgtcactct

SEQ ID NO: 14513 - DNA, 20 bp, synthetic construct
  source 1..20: mol_type = other DNA
tgtgctggttcatcagcatc

SEQ ID NO: 14514 - DNA, 20 bp, synthetic construct
  source 1..20: mol_type = other DNA
ctgcagggtcaggttcttcc

SEQ ID NO: 14515 - DNA, 20 bp, synthetic construct
  source 1..20: mol_type = other DNA
caattgtgaagtgtattggg

SEQ ID NO: 14516 - DNA, 20 bp, synthetic construct
  source 1..20: mol_type = other DNA
tcgaaaggaatatctccaca

SEQ ID NO: 14517 - DNA, 20 bp, synthetic construct
  source 1..20: mol_type = other DNA
aaaaggaagaccagttcact

SEQ ID NO: 14518 - DNA, 20 bp, synthetic construct
  source 1..20: mol_type = other DNA
gctcgagtgttggcagcaaa

SEQ ID NO: 14519 - DNA, 20 bp, synthetic construct
  source 1..20: mol_type = other DNA
catacacaagagatggcacc

SEQ ID NO: 14520 - DNA, 20 bp, synthetic construct
  source 1..20: mol_type = other DNA
tctttttggtgcccaaaatc

SEQ ID NO: 14521 - DNA, 20 bp, synthetic construct
  source 1..20: mol_type = other DNA
ctctgttggtactacagctg

SEQ ID NO: 14522 - DNA, 20 bp, synthetic construct
  source 1..20: mol_type = other DNA
ggaggaaaacgccagtacaa

SEQ ID NO: 14523 - DNA, 20 bp, synthetic construct
  source 1..20: mol_type = other DNA
gattgtagcattgatctggc

SEQ ID NO: 14524 - DNA, 20 bp, synthetic construct
  source 1..20: mol_type = other DNA
agtctgggcttacatgacaa

SEQ ID NO: 14525 - DNA, 20 bp, synthetic construct
  source 1..20: mol_type = other DNA
aggaccatagggtaataagt

SEQ ID NO: 14526 - DNA, 20 bp, synthetic construct
  source 1..20: mol_type = other DNA
accgtttattgtcgttacac

SEQ ID NO: 14527 - DNA, 20 bp, synthetic construct
  source 1..20: mol_type = other DNA
cttcttcatgcggtacagca

SEQ ID NO: 14528 - DNA, 20 bp, synthetic construct
  source 1..20: mol_type = other DNA
cttcctcacaggtgaagttg

SEQ ID NO: 14529 - DNA, 20 bp, synthetic construct
  source 1..20: mol_type = other DNA
cctttgctgacaataagcac

SEQ ID NO: 14530 - DNA, 20 bp, synthetic construct
  source 1..20: mol_type = other DNA
cacagccacttaaggaacca

SEQ ID NO: 14531 - DNA, 20 bp, synthetic construct
  source 1..20: mol_type = other DNA
tcatcttctacactgcttag

SEQ ID NO: 14532 - DNA, 20 bp, synthetic construct
  source 1..20: mol_type = other DNA
agaatgtacaggtcaggatt

SEQ ID NO: 14533 - DNA, 20 bp, synthetic construct
  source 1..20: mol_type = other DNA
ggcagaggaagttggtaaaa

SEQ ID NO: 14534 - DNA, 20 bp, synthetic construct
  source 1..20: mol_type = other DNA
agggatccacatcttcaaat

SEQ ID NO: 14535 - DNA, 20 bp, synthetic construct
  source 1..20: mol_type = other DNA
cagaaactgacatgtcttgg

SEQ ID NO: 14536 - DNA, 20 bp, synthetic construct
  source 1..20: mol_type = other DNA
ggacacgaggacagattcca

SEQ ID NO: 14537 - DNA, 20 bp, synthetic construct
  source 1..20: mol_type = other DNA
ttcctatctggataggacac

SEQ ID NO: 14538 - DNA, 20 bp, synthetic construct
  source 1..20: mol_type = other DNA
aatcccgtacatgacgtcac

SEQ ID NO: 14539 - DNA, 20 bp, synthetic construct
  source 1..20: mol_type = other DNA
tcctaagcaccggatagttg

SEQ ID NO: 14540 - DNA, 20 bp, synthetic construct
  source 1..20: mol_type = other DNA
tgttttgtggagtgaatgtg

SEQ ID NO: 14541 - DNA, 20 bp, synthetic construct
  source 1..20: mol_type = other DNA
atcgtagtctatgccttttg

SEQ ID NO: 14542 - DNA, 20 bp, synthetic construct
  source 1..20: mol_type = other DNA
acagccaaattcaggatgta

SEQ ID NO: 14543 - DNA, 20 bp, synthetic construct
  source 1..20: mol_type = other DNA
ttggaacccagatgaaaatg

SEQ ID NO: 14544 - DNA, 20 bp, synthetic construct
  source 1..20: mol_type = other DNA
cccagtgcatagttaagaca

SEQ ID NO: 14545 - DNA, 20 bp, synthetic construct
  source 1..20: mol_type = other DNA
gagtcatgacccatgtagga

SEQ ID NO: 14546 - DNA, 20 bp, synthetic construct
  source 1..20: mol_type = other DNA
ccatctgcttgaagaccatg

SEQ ID NO: 14547 - DNA, 20 bp, synthetic construct
  source 1..20: mol_type = other DNA
accctcaaaacatcccaggg

SEQ ID NO: 14548 - DNA, 20 bp, synthetic construct
  source 1..20: mol_type = other DNA
agagttgatgtactcccgaa

SEQ ID NO: 14549 - DNA, 20 bp, synthetic construct
  source 1..20: mol_type = other DNA
acctagagacttccttttga

SEQ ID NO: 14550 - DNA, 20 bp, synthetic construct
  source 1..20: mol_type = other DNA
ctgtcatttctgtctctagg

SEQ ID NO: 14551 - DNA, 20 bp, synthetic construct
  source 1..20: mol_type = other DNA
tctgaaaccttctttagcca

SEQ ID NO: 14552 - DNA, 20 bp, synthetic construct
  source 1..20: mol_type = other DNA
ctcttcttctcatttcgaca

SEQ ID NO: 14553 - DNA, 20 bp, synthetic construct
  source 1..20: mol_type = other DNA
tttggccaagcaatgaagtt

SEQ ID NO: 14554 - DNA, 20 bp, synthetic construct
  source 1..20: mol_type = other DNA
gcttgcaaaagtggacaccg

SEQ ID NO: 14555 - DNA, 20 bp, synthetic construct
  source 1..20: mol_type = other DNA
gcgatgatcaccttgatggc

SEQ ID NO: 14556 - DNA, 20 bp, synthetic construct
  source 1..20: mol_type = other DNA
tcgacgcgctttagaaacgg

SEQ ID NO: 14557 - DNA, 20 bp, synthetic construct
  source 1..20: mol_type = other DNA
ctcacaaggttctggcgtgg

SEQ ID NO: 14558 - DNA, 20 bp, synthetic construct
  source 1..20: mol_type = other DNA
tacagctacttagaaacagc

SEQ ID NO: 14559 - DNA, 20 bp, synthetic construct
  source 1..20: mol_type = other DNA
ctttgcacttcacttcattg

SEQ ID NO: 14560 - DNA, 20 bp, synthetic construct
  source 1..20: mol_type = other DNA
caacaacagacccgtctcca

SEQ ID NO: 14561 - DNA, 20 bp, synthetic construct
  source 1..20: mol_type = other DNA
ctgtgacgccttcatactga

SEQ ID NO: 14562 - DNA, 20 bp, synthetic construct
  source 1..20: mol_type = other DNA
gacatatctgcaccactgat

SEQ ID NO: 14563 - DNA, 20 bp, synthetic construct
  source 1..20: mol_type = other DNA
aaaagcagagtagagagcgt

SEQ ID NO: 14564 - DNA, 20 bp, synthetic construct
  source 1..20: mol_type = other DNA
ggtgacaacagaagccaaat

SEQ ID NO: 14565 - DNA, 20 bp, synthetic construct
  source 1..20: mol_type = other DNA
agcctgacatgtcagttcat

SEQ ID NO: 14566 - DNA, 20 bp, synthetic construct
  source 1..20: mol_type = other DNA
caggaactgaccctcaaatt

SEQ ID NO: 14567 - DNA, 20 bp, synthetic construct
  source 1..20: mol_type = other DNA
gctctgtttgatctttctcc

SEQ ID NO: 14568 - DNA, 20 bp, synthetic construct
  source 1..20: mol_type = other DNA
cacactcagcattggcagtg

SEQ ID NO: 14569 - DNA, 20 bp, synthetic construct
  source 1..20: mol_type = other DNA
gaagctgctgggagtaattc

SEQ ID NO: 14570 - DNA, 20 bp, synthetic construct
  source 1..20: mol_type = other DNA
aaatgtctgtggataccaca

SEQ ID NO: 14571 - DNA, 20 bp, synthetic construct
  source 1..20: mol_type = other DNA
ctccacatatgccaatgatg

SEQ ID NO: 14572 - DNA, 20 bp, synthetic construct
  source 1..20: mol_type = other DNA
tggtccacttgtgtgtgatg

SEQ ID NO: 14573 - DNA, 20 bp, synthetic construct
  source 1..20: mol_type = other DNA
caagaatcagcctttggtcc

SEQ ID NO: 14574 - DNA, 20 bp, synthetic construct
  source 1..20: mol_type = other DNA
agaagaaaatggagacatgg

SEQ ID NO: 14575 - DNA, 20 bp, synthetic construct
  source 1..20: mol_type = other DNA
tgttgcaaggctagtgctag

SEQ ID NO: 14576 - DNA, 20 bp, synthetic construct
  source 1..20: mol_type = other DNA
cagccaccacgtgttgtctt

SEQ ID NO: 14577 - DNA, 20 bp, synthetic construct
  source 1..20: mol_type = other DNA
tcctcatgtcgagccaagac

SEQ ID NO: 14578 - DNA, 20 bp, synthetic construct
  source 1..20: mol_type = other DNA
gagctaaaacaaccacagcg

SEQ ID NO: 14579 - DNA, 20 bp, synthetic construct
  source 1..20: mol_type = other DNA
acactctgtcctcaagttcc

SEQ ID NO: 14580 - DNA, 20 bp, synthetic construct
  source 1..20: mol_type = other DNA
tgagcaagaagggaaggtac

SEQ ID NO: 14581 - DNA, 20 bp, synthetic construct
  source 1..20: mol_type = other DNA
ttcagatccaggatactgag

SEQ ID NO: 14582 - DNA, 20 bp, synthetic construct
  source 1..20: mol_type = other DNA
tgcgtctctgattcaggcca

SEQ ID NO: 14583 - DNA, 20 bp, synthetic construct
  source 1..20: mol_type = other DNA
tcagtcacattgacaaacac

SEQ ID NO: 14584 - DNA, 20 bp, synthetic construct
  source 1..20: mol_type = other DNA
tcactctggaaacaatggag

SEQ ID NO: 14585 - DNA, 20 bp, synthetic construct
  source 1..20: mol_type = other DNA
gtcattgaaagaggtcctgt

SEQ ID NO: 14586 - DNA, 20 bp, synthetic construct
  source 1..20: mol_type = other DNA
ggacagtggacttgtttaga

SEQ ID NO: 14587 - DNA, 20 bp, synthetic construct
  source 1..20: mol_type = other DNA
tgctttgttccttctgcaga

SEQ ID NO: 14588 - DNA, 20 bp, synthetic construct
  source 1..20: mol_type = other DNA
aggccttcatccctgctcgt

SEQ ID NO: 14589 - DNA, 20 bp, synthetic construct
  source 1..20: mol_type = other DNA
gctttgtagggcttgcatga

SEQ ID NO: 14590 - DNA, 20 bp, synthetic construct
  source 1..20: mol_type = other DNA
ctccgcccacttggtagatg

SEQ ID NO: 14591 - DNA, 20 bp, synthetic construct
  source 1..20: mol_type = other DNA
tgaaaggagaatgtcccagg

SEQ ID NO: 14592 - DNA, 20 bp, synthetic construct
  source 1..20: mol_type = other DNA
ccctcgtcagatgggcgcag

SEQ ID NO: 14593 - DNA, 20 bp, synthetic construct
  source 1..20: mol_type = other DNA
caggcagggctgatgacaat

SEQ ID NO: 14594 - DNA, 20 bp, synthetic construct
  source 1..20: mol_type = other DNA
gaagataaaagccgcgtctt

SEQ ID NO: 14595 - DNA, 20 bp, synthetic construct
  source 1..20: mol_type = other DNA
ttgccttctggaagaaatca

SEQ ID NO: 14596 - DNA, 20 bp, synthetic construct
  source 1..20: mol_type = other DNA
gaagtacttgttcccttgcc

SEQ ID NO: 14597 - DNA, 20 bp, synthetic construct
  source 1..20: mol_type = other DNA
ccacgccctaccgcgatgtg

SEQ ID NO: 14598 - DNA, 20 bp, synthetic construct
  source 1..20: mol_type = other DNA
gagaacaagtgagtctagga

SEQ ID NO: 14599 - DNA, 20 bp, synthetic construct
  source 1..20: mol_type = other DNA
agttttgcatgaaggcttgg

SEQ ID NO: 14600 - DNA, 20 bp, synthetic construct
  source 1..20: mol_type = other DNA
tctgtaaagtttagcagtgc

SEQ ID NO: 14601 - DNA, 20 bp, synthetic construct
  source 1..20: mol_type = other DNA
gcatgttggaaatctacttg

SEQ ID NO: 14602 - DNA, 20 bp, synthetic construct
  source 1..20: mol_type = other DNA
catgaccattggtcaacagc

SEQ ID NO: 14603 - DNA, 20 bp, synthetic construct
  source 1..20: mol_type = other DNA
cctatgcccaggtagtatgg

SEQ ID NO: 14604 - DNA, 20 bp, synthetic construct
  source 1..20: mol_type = other DNA
tccatggcattaaccacatg

SEQ ID NO: 14605 - DNA, 20 bp, synthetic construct
  source 1..20: mol_type = other DNA
ccgatctgcttctcgaaggt

SEQ ID NO: 14606 - DNA, 20 bp, synthetic construct
  source 1..20: mol_type = other DNA
gaagagccagaacaaagtgc

SEQ ID NO: 14607 - DNA, 20 bp, synthetic construct
  source 1..20: mol_type = other DNA
cagcagaggcctagcaagtc

SEQ ID NO: 14608 - DNA, 20 bp, synthetic construct
  source 1..20: mol_type = other DNA
ggcttgttccaaaagccggg

SEQ ID NO: 14609 - DNA, 20 bp, synthetic construct
  source 1..20: mol_type = other DNA
cttctgctgccgtcgcttga

SEQ ID NO: 14610 - DNA, 20 bp, synthetic construct
  source 1..20: mol_type = other DNA
gacggtcatcgtccgtgacc

SEQ ID NO: 14611 - DNA, 20 bp, synthetic construct
  source 1..20: mol_type = other DNA
gaaaaatgggctttgtctgt

SEQ ID NO: 14612 - DNA, 20 bp, synthetic construct
  source 1..20: mol_type = other DNA
aaaacttcagtcttctgcct

SEQ ID NO: 14613 - DNA, 20 bp, synthetic construct
  source 1..20: mol_type = other DNA
actgtaccggaacctgtagt

SEQ ID NO: 14614 - DNA, 20 bp, synthetic construct
  source 1..20: mol_type = other DNA
acttgatgatgtagccggta

SEQ ID NO: 14615 - DNA, 20 bp, synthetic construct
  source 1..20: mol_type = other DNA
tctgcttgtcaaagtgtcct

SEQ ID NO: 14616 - DNA, 20 bp, synthetic construct
  source 1..20: mol_type = other DNA
ggaccaggttgtaaaaaggg

SEQ ID NO: 14617 - DNA, 20 bp, synthetic construct
  source 1..20: mol_type = other DNA
aggcacgggcaggatttctc

SEQ ID NO: 14618 - DNA, 20 bp, synthetic construct
  source 1..20: mol_type = other DNA
ggagagtggattctggatcg

SEQ ID NO: 14619 - DNA, 20 bp, synthetic construct
  source 1..20: mol_type = other DNA
ggctgtaatgcagaggcatt

SEQ ID NO: 14620 - DNA, 20 bp, synthetic construct
  source 1..20: mol_type = other DNA
ttgggagttattaagagcgc

SEQ ID NO: 14621 - DNA, 20 bp, synthetic construct
  source 1..20: mol_type = other DNA
actaagtaggaccatgtagg

SEQ ID NO: 14622 - DNA, 20 bp, synthetic construct
  source 1..20: mol_type = other DNA
cagcacgaagtcgtctcgta

SEQ ID NO: 14623 - DNA, 20 bp, synthetic construct
  source 1..20: mol_type = other DNA
actgtcagcaacacttcctg

SEQ ID NO: 14624 - DNA, 20 bp, synthetic construct
  source 1..20: mol_type = other DNA
ctcattctttgagagagagt

SEQ ID NO: 14625 - DNA, 20 bp, synthetic construct
  source 1..20: mol_type = other DNA
acctccagagactatagcgt

SEQ ID NO: 14626 - DNA, 20 bp, synthetic construct
  source 1..20: mol_type = other DNA
tcattatgcctgggatttgg

SEQ ID NO: 14627 - DNA, 20 bp, synthetic construct
  source 1..20: mol_type = other DNA
tggccaatacacaccaatca

SEQ ID NO: 14628 - DNA, 20 bp, synthetic construct
  source 1..20: mol_type = other DNA
agcctcaaagctggcaaatc

SEQ ID NO: 14629 - DNA, 20 bp, synthetic construct
  source 1..20: mol_type = other DNA
tcagcacagctatgatgaaa

SEQ ID NO: 14630 - DNA, 20 bp, synthetic construct
  source 1..20: mol_type = other DNA
gaagctggccagactctatg

SEQ ID NO: 14631 - DNA, 20 bp, synthetic construct
  source 1..20: mol_type = other DNA
gggtcctggcagtaacagcc

SEQ ID NO: 14632 - DNA, 20 bp, synthetic construct
  source 1..20: mol_type = other DNA
cctgagataaagccttgtaa

SEQ ID NO: 14633 - DNA, 20 bp, synthetic construct
  source 1..20: mol_type = other DNA
tgcttgtcatgtagtagctg

SEQ ID NO: 14634 - DNA, 20 bp, synthetic construct
  source 1..20: mol_type = other DNA
cggcgctgaaagtggcattg

SEQ ID NO: 14635 - DNA, 20 bp, synthetic construct
  source 1..20: mol_type = other DNA
ccggtcgagaaggaagcctg

SEQ ID NO: 14636 - DNA, 20 bp, synthetic construct
  source 1..20: mol_type = other DNA
cataccactggaaacagcaa

SEQ ID NO: 14637 - DNA, 20 bp, synthetic construct
  source 1..20: mol_type = other DNA
cccgaggatgaagccattgt

SEQ ID NO: 14638 - DNA, 20 bp, synthetic construct
  source 1..20: mol_type = other DNA
ttagcctgcaggtctaaccc

SEQ ID NO: 14639 - DNA, 20 bp, synthetic construct
  source 1..20: mol_type = other DNA
caagaagcaaattggtactc

SEQ ID NO: 14640 - DNA, 20 bp, synthetic construct
  source 1..20: mol_type = other DNA
gcataactcttcccaatagg

SEQ ID NO: 14641 - DNA, 20 bp, synthetic construct
  source 1..20: mol_type = other DNA
agtcccggagcgtgcagttc

SEQ ID NO: 14642 - DNA, 20 bp, synthetic construct
  source 1..20: mol_type = other DNA
tcaggtacttctgccatggc

SEQ ID NO: 14643 - DNA, 20 bp, synthetic construct
  source 1..20: mol_type = other DNA
accttgtcttcccgtgggtc

SEQ ID NO: 14644 - DNA, 20 bp, synthetic construct
  source 1..20: mol_type = other DNA
gacttctgttgtctgttccc

SEQ ID NO: 14645 - DNA, 20 bp, synthetic construct
  source 1..20: mol_type = other DNA
caccctcagggtgacgatgt

SEQ ID NO: 14646 - DNA, 20 bp, synthetic construct
  source 1..20: mol_type = other DNA
aggcaacaggaatcctgacc

SEQ ID NO: 14647 - DNA, 20 bp, synthetic construct
  source 1..20: mol_type = other DNA
aacaacaacaatctgaggtg

SEQ ID NO: 14648 - DNA, 20 bp, synthetic construct
  source 1..20: mol_type = other DNA
tctctggagttctgaagtaa

SEQ ID NO: 14649 - DNA, 20 bp, synthetic construct
  source 1..20: mol_type = other DNA
cttgactcatgttgagtgcc

SEQ ID NO: 14650 - DNA, 20 bp, synthetic construct
  source 1..20: mol_type = other DNA
cgggatttggttggaattaa

SEQ ID NO: 14651 - DNA, 20 bp, synthetic construct
  source 1..20: mol_type = other DNA
ggaggttcccgaaagcagac

SEQ ID NO: 14652 - DNA, 20 bp, synthetic construct
  source 1..20: mol_type = other DNA
tcctctgtgtccaagttgaa

SEQ ID NO: 14653 - DNA, 20 bp, synthetic construct
  source 1..20: mol_type = other DNA
cctagcttcttgacattcct

SEQ ID NO: 14654 - DNA, 20 bp, synthetic construct
  source 1..20: mol_type = other DNA
tcgcagcttatcagggtgcg

SEQ ID NO: 14655 - DNA, 20 bp, synthetic construct
  source 1..20: mol_type = other DNA
agctgtgtagcacttgtttc

SEQ ID NO: 14656 - DNA, 20 bp, synthetic construct
  source 1..20: mol_type = other DNA
cctggacaaaaataccaatc

SEQ ID NO: 14657 - DNA, 20 bp, synthetic construct
  source 1..20: mol_type = other DNA
tatcagtgaaggttctgttc

SEQ ID NO: 14658 - DNA, 20 bp, synthetic construct
  source 1..20: mol_type = other DNA
cactttgtgccactaaatgt

SEQ ID NO: 14659 - DNA, 20 bp, synthetic construct
  source 1..20: mol_type = other DNA
tcttcacggcttgccgcgtg

SEQ ID NO: 14660 - DNA, 20 bp, synthetic construct
  source 1..20: mol_type = other DNA
gacatcaacgaaaggcatat

SEQ ID NO: 14661 - DNA, 20 bp, synthetic construct
  source 1..20: mol_type = other DNA
cacccaagtccatgtcattt

SEQ ID NO: 14662 - DNA, 20 bp, synthetic construct
  source 1..20: mol_type = other DNA
cggagggtgaatcccttgct

SEQ ID NO: 14663 - DNA, 20 bp, synthetic construct
  source 1..20: mol_type = other DNA
ataacctctggagcacagat

SEQ ID NO: 14664 - DNA, 20 bp, synthetic construct
  source 1..20: mol_type = other DNA
tagagagtgatagcaaccca

SEQ ID NO: 14665 - DNA, 20 bp, synthetic construct
  source 1..20: mol_type = other DNA
tagagtgggagttaggaaaa

SEQ ID NO: 14666 - DNA, 20 bp, synthetic construct
  source 1..20: mol_type = other DNA
atgaagaagctttgcgtggg

SEQ ID NO: 14667 - DNA, 20 bp, synthetic construct
  source 1..20: mol_type = other DNA
ctgtgctggagtatggctcc

SEQ ID NO: 14668 - DNA, 20 bp, synthetic construct
  source 1..20: mol_type = other DNA
gacgtggtcactgccagacg

SEQ ID NO: 14669 - DNA, 20 bp, synthetic construct
  source 1..20: mol_type = other DNA
ccgtatccgcgctgtacgtg

SEQ ID NO: 14670 - DNA, 20 bp, synthetic construct
  source 1..20: mol_type = other DNA
cagtccagtccagagtcctt

SEQ ID NO: 14671 - DNA, 20 bp, synthetic construct
  source 1..20: mol_type = other DNA
tccagaagcttctttagatg

SEQ ID NO: 14672 - DNA, 20 bp, synthetic construct
  source 1..20: mol_type = other DNA
gccctgaccacgctcatgtg

SEQ ID NO: 14673 - DNA, 20 bp, synthetic construct
  source 1..20: mol_type = other DNA
cacgtcctcgagccggtcag

SEQ ID NO: 14674 - DNA, 20 bp, synthetic construct
  source 1..20: mol_type = other DNA
tcttggcgcaaacgttgcat

SEQ ID NO: 14675 - DNA, 20 bp, synthetic construct
  source 1..20: mol_type = other DNA
tgcaccaggcacgaacttgt

SEQ ID NO: 14676 - DNA, 20 bp, synthetic construct
  source 1..20: mol_type = other DNA
gacaagcttggtctaatggg

SEQ ID NO: 14677 - DNA, 20 bp, synthetic construct
  source 1..20: mol_type = other DNA
gcctggtgaatgattcaaca

SEQ ID NO: 14678 - DNA, 20 bp, synthetic construct
  source 1..20: mol_type = other DNA
tccatccttgaaaaggcgca

SEQ ID NO: 14679 - DNA, 20 bp, synthetic construct
  source 1..20: mol_type = other DNA
ggctgcctttagtttgtggc

SEQ ID NO: 14680 - DNA, 20 bp, synthetic construct
  source 1..20: mol_type = other DNA
ctttcaacttgagcaggacc

SEQ ID NO: 14681 - DNA, 20 bp, synthetic construct
  source 1..20: mol_type = other DNA
gtcaggccgcagtacacacc

SEQ ID NO: 14682 - DNA, 20 bp, synthetic construct
  source 1..20: mol_type = other DNA
tgctggaaaagactgaaggt

SEQ ID NO: 14683 - DNA, 20 bp, synthetic construct
  source 1..20: mol_type = other DNA
ctgtcaagctctttctgttt

SEQ ID NO: 14684 - DNA, 20 bp, synthetic construct
  source 1..20: mol_type = other DNA
ggagttgatctgagttaaga

SEQ ID NO: 14685 - DNA, 20 bp, synthetic construct
  source 1..20: mol_type = other DNA
agaaggtctgatggagaatg

SEQ ID NO: 14686 - DNA, 20 bp, synthetic construct
  source 1..20: mol_type = other DNA
tgcccaccaatgtagaggat

SEQ ID NO: 14687 - DNA, 20 bp, synthetic construct
  source 1..20: mol_type = other DNA
tatggtgagaatggacatga

SEQ ID NO: 14688 - DNA, 20 bp, synthetic construct
  source 1..20: mol_type = other DNA
atcggctcggtgcccgtcag

SEQ ID NO: 14689 - DNA, 20 bp, synthetic construct
  source 1..20: mol_type = other DNA
gctgactgctcgaaactcag

SEQ ID NO: 14690 - DNA, 20 bp, synthetic construct
  source 1..20: mol_type = other DNA
tctctccaccagaatctaag

SEQ ID NO: 14691 - DNA, 20 bp, synthetic construct
  source 1..20: mol_type = other DNA
catcatccagctgagaaaag

SEQ ID NO: 14692 - DNA, 20 bp, synthetic construct
  source 1..20: mol_type = other DNA
catttcagtaacctgaccca

SEQ ID NO: 14693 - DNA, 20 bp, synthetic construct
  source 1..20: mol_type = other DNA
ttttaaccatgcgcaagaca

SEQ ID NO: 14694 - DNA, 20 bp, synthetic construct
  source 1..20: mol_type = other DNA
gtaagcaagtcctcaaatga

SEQ ID NO: 14695 - DNA, 20 bp, synthetic construct
  source 1..20: mol_type = other DNA
gtttttcagagtgagcaaag

SEQ ID NO: 14696 - DNA, 20 bp, synthetic construct
  source 1..20: mol_type = other DNA
ttcaaaaccgtggcaagagc

SEQ ID NO: 14697 - DNA, 20 bp, synthetic construct
  source 1..20: mol_type = other DNA
caaccctaggcatgttgttc

SEQ ID NO: 14698 - DNA, 20 bp, synthetic construct
  source 1..20: mol_type = other DNA
caggctcttgcaatagtcat

SEQ ID NO: 14699 - DNA, 20 bp, synthetic construct
  source 1..20: mol_type = other DNA
ggcaggaggtatgcatggca

SEQ ID NO: 14700 - DNA, 20 bp, synthetic construct
  source 1..20: mol_type = other DNA
tgaccttgtttacaatcctg

SEQ ID NO: 14701 - DNA, 20 bp, synthetic construct
  source 1..20: mol_type = other DNA
atggtttccttggaatgcag

SEQ ID NO: 14702 - DNA, 20 bp, synthetic construct
  source 1..20: mol_type = other DNA
ataaggagcacatgctatgt

SEQ ID NO: 14703 - DNA, 20 bp, synthetic construct
  source 1..20: mol_type = other DNA
gggtccagtgaagcgtcaga

SEQ ID NO: 14704 - DNA, 20 bp, synthetic construct
  source 1..20: mol_type = other DNA
gaggctcagcaatgagtgac

SEQ ID NO: 14705 - DNA, 20 bp, synthetic construct
  source 1..20: mol_type = other DNA
acatgtcaacatgactgagt

SEQ ID NO: 14706 - DNA, 20 bp, synthetic construct
  source 1..20: mol_type = other DNA
aggatggcttgaagatgtac

SEQ ID NO: 14707 - DNA, 20 bp, synthetic construct
  source 1..20: mol_type = other DNA
aaaactctctaatcttccgg

SEQ ID NO: 14708 - DNA, 20 bp, synthetic construct
  source 1..20: mol_type = other DNA
ctgaacaaaagcatccgata

SEQ ID NO: 14709 - DNA, 20 bp, synthetic construct
  source 1..20: mol_type = other DNA
tcatacacgtactcctggac

SEQ ID NO: 14710 - DNA, 20 bp, synthetic construct
  source 1..20: mol_type = other DNA
ctggaccttggttttgttgg

SEQ ID NO: 14711 - DNA, 20 bp, synthetic construct
  source 1..20: mol_type = other DNA
attgcttgttggatgaactg

SEQ ID NO: 14712 - DNA, 20 bp, synthetic construct
  source 1..20: mol_type = other DNA
ccttccgtgaagactctgct

SEQ ID NO: 14713 - DNA, 20 bp, synthetic construct
  source 1..20: mol_type = other DNA
cctcttggaacacgctgacc

SEQ ID NO: 14714 - DNA, 20 bp, synthetic construct
  source 1..20: mol_type = other DNA
gctgagatagttctgttcac

SEQ ID NO: 14715 - DNA, 20 bp, synthetic construct
  source 1..20: mol_type = other DNA
cagttcccacactctgtatg

SEQ ID NO: 14716 - DNA, 20 bp, synthetic construct
  source 1..20: mol_type = other DNA
gggtccgtgcgatcctcagc

SEQ ID NO: 14717 - DNA, 20 bp, synthetic construct
  source 1..20: mol_type = other DNA
atcaaaacggcttccttcag

SEQ ID NO: 14718 - DNA, 20 bp, synthetic construct
  source 1..20: mol_type = other DNA
tacccgccaagcggtcgatg

SEQ ID NO: 14719 - DNA, 20 bp, synthetic construct
  source 1..20: mol_type = other DNA
cgttctttgcttgaaatcag

SEQ ID NO: 14720 - DNA, 20 bp, synthetic construct
  source 1..20: mol_type = other DNA
ccacggcgatgtcgctggga

SEQ ID NO: 14721 - DNA, 20 bp, synthetic construct
  source 1..20: mol_type = other DNA
aatgaaacggattcccatgg

SEQ ID NO: 14722 - DNA, 20 bp, synthetic construct
  source 1..20: mol_type = other DNA
aggctggagaataatgcctt

SEQ ID NO: 14723 - DNA, 20 bp, synthetic construct
  source 1..20: mol_type = other DNA
tggctgtcggtccatgtagg

SEQ ID NO: 14724 - DNA, 20 bp, synthetic construct
  source 1..20: mol_type = other DNA
tggtctcatcgagtgagcgg

SEQ ID NO: 14725 - DNA, 20 bp, synthetic construct
  source 1..20: mol_type = other DNA
cagtttgacgatgcggttgt

SEQ ID NO: 14726 - DNA, 20 bp, synthetic construct
  source 1..20: mol_type = other DNA
gtactcactggaccacactg

SEQ ID NO: 14727 - DNA, 20 bp, synthetic construct
  source 1..20: mol_type = other DNA
ggatgatctctatgtgaaag

SEQ ID NO: 14728 - DNA, 20 bp, synthetic construct
  source 1..20: mol_type = other DNA
atggccttcgattctggatt

SEQ ID NO: 14729 - DNA, 20 bp, synthetic construct
  source 1..20: mol_type = other DNA
actttgtaaactccgatggt

SEQ ID NO: 14730 - DNA, 20 bp, synthetic construct
  source 1..20: mol_type = other DNA
cacaatatcacagccaaggc

SEQ ID NO: 14731 - DNA, 20 bp, synthetic construct
  source 1..20: mol_type = other DNA
cttggacaaccattcccacg

SEQ ID NO: 14732 - DNA, 20 bp, synthetic construct
  source 1..20: mol_type = other DNA
gcatgagaagcagagatgtc

SEQ ID NO: 14733 - DNA, 20 bp, synthetic construct
  source 1..20: mol_type = other DNA
ctctagcgcttagtacttca

SEQ ID NO: 14734 - DNA, 20 bp, synthetic construct
  source 1..20: mol_type = other DNA
agtccagaatatccgcaagt

SEQ ID NO: 14735 - DNA, 20 bp, synthetic construct
  source 1..20: mol_type = other DNA
gcttctctcgcattcttctg

SEQ ID NO: 14736 - DNA, 20 bp, synthetic construct
  source 1..20: mol_type = other DNA
cggcaacctcggcgtcattt

SEQ ID NO: 14737 - DNA, 20 bp, synthetic construct
  source 1..20: mol_type = other DNA
gtgacagcttggagatgata

SEQ ID NO: 14738 - DNA, 20 bp, synthetic construct
  source 1..20: mol_type = other DNA
actgtaggtgctgaaatcaa

SEQ ID NO: 14739 - DNA, 20 bp, synthetic construct
  source 1..20: mol_type = other DNA
acatcttagccagaacttga

SEQ ID NO: 14740 - DNA, 20 bp, synthetic construct
  source 1..20: mol_type = other DNA
gatggccttggctgactttg

SEQ ID NO: 14741 - DNA, 20 bp, synthetic construct
  source 1..20: mol_type = other DNA
ttggaattgtcctcagaaga

SEQ ID NO: 14742 - DNA, 20 bp, synthetic construct
  source 1..20: mol_type = other DNA
cagttaacacagtttatggc

SEQ ID NO: 14743 - DNA, 20 bp, synthetic construct
  source 1..20: mol_type = other DNA
ggtgtccttgcacgtggctt

SEQ ID NO: 14744 - DNA, 20 bp, synthetic construct
  source 1..20: mol_type = other DNA
tcacttacatggacgtgaag

SEQ ID NO: 14745 - DNA, 20 bp, synthetic construct
  source 1..20: mol_type = other DNA
tacgatgccggagcgaacga

SEQ ID NO: 14746 - DNA, 20 bp, synthetic construct
  source 1..20: mol_type = other DNA
ggcccgaagatcaaagacgc

SEQ ID NO: 14747 - DNA, 20 bp, synthetic construct
  source 1..20: mol_type = other DNA
ggtagacgaaatgatcgtgg

SEQ ID NO: 14748 - DNA, 20 bp, synthetic construct
  source 1..20: mol_type = other DNA
gtatgtaaggcctgaccgga

SEQ ID NO: 14749 - DNA, 20 bp, synthetic construct
  source 1..20: mol_type = other DNA
gtacagatggcggcaagcat

SEQ ID NO: 14750 - DNA, 20 bp, synthetic construct
  source 1..20: mol_type = other DNA
cacgccggttatctcttgca

SEQ ID NO: 14751 - DNA, 20 bp, synthetic construct
  source 1..20: mol_type = other DNA
tataaccaagctttgtgcct

SEQ ID NO: 14752 - DNA, 20 bp, synthetic construct
  source 1..20: mol_type = other DNA
cccttttgagaggcgtatta

SEQ ID NO: 14753 - DNA, 20 bp, synthetic construct
  source 1..20: mol_type = other DNA
acaaaggcagtgtagacttt

SEQ ID NO: 14754 - DNA, 20 bp, synthetic construct
  source 1..20: mol_type = other DNA
cctagaactatactgtgtag

SEQ ID NO: 14755 - DNA, 20 bp, synthetic construct
  source 1..20: mol_type = other DNA
cactgaatgctgagcggtat

SEQ ID NO: 14756 - DNA, 20 bp, synthetic construct
  source 1..20: mol_type = other DNA
ttgcttggatactaacacct

SEQ ID NO: 14757 - DNA, 20 bp, synthetic construct
  source 1..20: mol_type = other DNA
gtccctatttctatcatcac

SEQ ID NO: 14758 - DNA, 20 bp, synthetic construct
  source 1..20: mol_type = other DNA
tttccgtacagtctttggta

SEQ ID NO: 14759 - DNA, 20 bp, synthetic construct
  source 1..20: mol_type = other DNA
gaaccctgtccaccttagag

SEQ ID NO: 14760 - DNA, 20 bp, synthetic construct
  source 1..20: mol_type = other DNA
tcttggtttctgttgccatc

SEQ ID NO: 14761 - DNA, 20 bp, synthetic construct
  source 1..20: mol_type = other DNA
ccatagggaacagaaagttc

SEQ ID NO: 14762 - DNA, 20 bp, synthetic construct
  source 1..20: mol_type = other DNA
gcaccggaaacgggctgttt

SEQ ID NO: 14763 - DNA, 20 bp, synthetic construct
  source 1..20: mol_type = other DNA
tgagtcgtgctggagatgtg

SEQ ID NO: 14764 - DNA, 20 bp, synthetic construct
  source 1..20: mol_type = other DNA
ccaactgatagtgaaggttc

SEQ ID NO: 14765 - DNA, 20 bp, synthetic construct
  source 1..20: mol_type = other DNA
gccaaagcaaatggcacaga

SEQ ID NO: 14766 - DNA, 20 bp, synthetic construct
  source 1..20: mol_type = other DNA
ccagaagaaactccgtggcc

SEQ ID NO: 14767 - DNA, 20 bp, synthetic construct
  source 1..20: mol_type = other DNA
tgtcgcgctcgacgtcgacg

SEQ ID NO: 14768 - DNA, 20 bp, synthetic construct
  source 1..20: mol_type = other DNA
ttgcaggtttgcgatgtaag

SEQ ID NO: 14769 - DNA, 20 bp, synthetic construct
  source 1..20: mol_type = other DNA
taggttggtttcttgaagtg

SEQ ID NO: 14770 - DNA, 20 bp, synthetic construct
  source 1..20: mol_type = other DNA
ccaccaaaaaaatcaggccc

SEQ ID NO: 14771 - DNA, 20 bp, synthetic construct
  source 1..20: mol_type = other DNA
ccaggaattgaaaagcccaa

SEQ ID NO: 14772 - DNA, 20 bp, synthetic construct
  source 1..20: mol_type = other DNA
ctggcagttgcaggtctctc

SEQ ID NO: 14773 - DNA, 20 bp, synthetic construct
  source 1..20: mol_type = other DNA
atcatcctttgttgggagac

SEQ ID NO: 14774 - DNA, 20 bp, synthetic construct
  source 1..20: mol_type = other DNA
tgtatgcccgatagggcacg

SEQ ID NO: 14775 - DNA, 20 bp, synthetic construct
  source 1..20: mol_type = other DNA
cactggacattcacatcgga

SEQ ID NO: 14776 - DNA, 20 bp, synthetic construct
  source 1..20: mol_type = other DNA
ggctccgaagctgctgccgt

SEQ ID NO: 14777 - DNA, 20 bp, synthetic construct
  source 1..20: mol_type = other DNA
ctgagcagccaatttgtgtc

SEQ ID NO: 14778 - DNA, 20 bp, synthetic construct
  source 1..20: mol_type = other DNA
tctccacacccgatgtaccc

SEQ ID NO: 14779 - DNA, 20 bp, synthetic construct
  source 1..20: mol_type = other DNA
tagctacaaggtcagtatca

SEQ ID NO: 14780 - DNA, 20 bp, synthetic construct
  source 1..20: mol_type = other DNA
agcggaggacgtaccaaccg

SEQ ID NO: 14781 - DNA, 20 bp, synthetic construct
  source 1..20: mol_type = other DNA
cctcgagccgggcgaaatgc

SEQ ID NO: 14782 - DNA, 20 bp, synthetic construct
  source 1..20: mol_type = other DNA
tctccaacacgtggcagccg

SEQ ID NO: 14783 - DNA, 20 bp, synthetic construct
  source 1..20: mol_type = other DNA
ctgtttgccgtagcgtcgcc

SEQ ID NO: 14784 - DNA, 20 bp, synthetic construct
  source 1..20: mol_type = other DNA
ccacaagttttggcacccaa

SEQ ID NO: 14785 - DNA, 20 bp, synthetic construct
  source 1..20: mol_type = other DNA
gaagccgggactgctccacc

SEQ ID NO: 14786 - DNA, 20 bp, synthetic construct
  source 1..20: mol_type = other DNA
agcagacctttgtctgcata

SEQ ID NO: 14787 - DNA, 20 bp, synthetic construct
  source 1..20: mol_type = other DNA
atgtgtgtgttcttgtgatg

SEQ ID NO: 14788 - DNA, 20 bp, synthetic construct
  source 1..20: mol_type = other DNA
gattccagttaggaaccaag

SEQ ID NO: 14789 - DNA, 20 bp, synthetic construct
  source 1..20: mol_type = other DNA
gctgattccagttaggaacc

SEQ ID NO: 14790 - DNA, 20 bp, synthetic construct
  source 1..20: mol_type = other DNA
cgggagcctgtttcgggtgc

SEQ ID NO: 14791 - DNA, 20 bp, synthetic construct
  source 1..20: mol_type = other DNA
ctgaactcaggtaaaacatc

SEQ ID NO: 14792 - DNA, 20 bp, synthetic construct
  source 1..20: mol_type = other DNA
gttgatcatcatagtaggtg

SEQ ID NO: 14793 - DNA, 20 bp, synthetic construct
  source 1..20: mol_type = other DNA
aaaaccggacttcatctctg

SEQ ID NO: 14794 - DNA, 20 bp, synthetic construct
  source 1..20: mol_type = other DNA
ctccgcttttcaacttgcct

SEQ ID NO: 14795 - DNA, 20 bp, synthetic construct
  source 1..20: mol_type = other DNA
atcaggactgtggtaagatt

SEQ ID NO: 14796 - DNA, 20 bp, synthetic construct
  source 1..20: mol_type = other DNA
ttccatttatgcacgtgccc

SEQ ID NO: 14797 - DNA, 20 bp, synthetic construct
  source 1..20: mol_type = other DNA
cacgtacttgatgaggtcgg

SEQ ID NO: 14798 - DNA, 20 bp, synthetic construct
  source 1..20: mol_type = other DNA
acgtttggcatttcttggtc

SEQ ID NO: 14799 - DNA, 20 bp, synthetic construct
  source 1..20: mol_type = other DNA
cactgggctgttgatgaagt

SEQ ID NO: 14800 - DNA, 20 bp, synthetic construct
  source 1..20: mol_type = other DNA
gcattggattcttcaatggc

SEQ ID NO: 14801 - DNA, 20 bp, synthetic construct
  source 1..20: mol_type = other DNA
cacatagatgtaaatgtgcc

SEQ ID NO: 14802 - DNA, 20 bp, synthetic construct
  source 1..20: mol_type = other DNA
ggagtctgtagacatagtag

SEQ ID NO: 14803 - DNA, 20 bp, synthetic construct
  source 1..20: mol_type = other DNA
gtcaccctcattgggctgca

SEQ ID NO: 14804 - DNA, 20 bp, synthetic construct
  source 1..20: mol_type = other DNA
ggaccactgctaccacatca

SEQ ID NO: 14805 - DNA, 20 bp, synthetic construct
  source 1..20: mol_type = other DNA
acggtgaccagttcactctt

SEQ ID NO: 14806 - DNA, 20 bp, synthetic construct
  source 1..20: mol_type = other DNA
actgccgccgacctgccatg

SEQ ID NO: 14807 - DNA, 20 bp, synthetic construct
  source 1..20: mol_type = other DNA
acatcttgcatccatggatg

SEQ ID NO: 14808 - DNA, 20 bp, synthetic construct
  source 1..20: mol_type = other DNA
gtctgaagtgctcgcgatgg

SEQ ID NO: 14809 - DNA, 20 bp, synthetic construct
  source 1..20: mol_type = other DNA
atcatcaccattttggttcc

SEQ ID NO: 14810 - DNA, 20 bp, synthetic construct
  source 1..20: mol_type = other DNA
tatacgaagactctgagctg

SEQ ID NO: 14811 - DNA, 20 bp, synthetic construct
  source 1..20: mol_type = other DNA
gatatttaggtgggagacta

SEQ ID NO: 14812 - DNA, 20 bp, synthetic construct
  source 1..20: mol_type = other DNA
tcatctcgattaccctcata

SEQ ID NO: 14813 - DNA, 20 bp, synthetic construct
  source 1..20: mol_type = other DNA
acaacaggaaggttaaggtg

SEQ ID NO: 14814 - DNA, 20 bp, synthetic construct
  source 1..20: mol_type = other DNA
ccttggctgaacctaccgac

SEQ ID NO: 14815 - DNA, 20 bp, synthetic construct
  source 1..20: mol_type = other DNA
ttcttaaccctgatgctgtc

SEQ ID NO: 14816 - DNA, 20 bp, synthetic construct
  source 1..20: mol_type = other DNA
gaggtttctgggttcctacc

SEQ ID NO: 14817 - DNA, 20 bp, synthetic construct
  source 1..20: mol_type = other DNA
agggttttggaaacattcca

SEQ ID NO: 14818 - DNA, 20 bp, synthetic construct
  source 1..20: mol_type = other DNA
tgcactctgaactgttttgg

SEQ ID NO: 14819 - DNA, 20 bp, synthetic construct
  source 1..20: mol_type = other DNA
tttaaggtgactctggtagt

SEQ ID NO: 14820 - DNA, 20 bp, synthetic construct
  source 1..20: mol_type = other DNA
ggcccaattttctccatcag

SEQ ID NO: 14821 - DNA, 20 bp, synthetic construct
  source 1..20: mol_type = other DNA
tacagatgtcatacatccca

SEQ ID NO: 14822 - DNA, 20 bp, synthetic construct
  source 1..20: mol_type = other DNA
ttcacagcattgagctgggt

SEQ ID NO: 14823 - DNA, 20 bp, synthetic construct
  source 1..20: mol_type = other DNA
catccactgtacttaaatgg

SEQ ID NO: 14824 - DNA, 20 bp, synthetic construct
  source 1..20: mol_type = other DNA
gtgtgtacctgctggttgcc

SEQ ID NO: 14825 - DNA, 20 bp, synthetic construct
  source 1..20: mol_type = other DNA
ccatcaacacaagtggctcc

SEQ ID NO: 14826 - DNA, 20 bp, synthetic construct
  source 1..20: mol_type = other DNA
ggcaaagttctcttccattt

SEQ ID NO: 14827 - DNA, 20 bp, synthetic construct
  source 1..20: mol_type = other DNA
ccctgggaaactcagctgct

SEQ ID NO: 14828 - DNA, 20 bp, synthetic construct
  source 1..20: mol_type = other DNA
ttgtcgtcgtcctcgaggaa

SEQ ID NO: 14829 - DNA, 20 bp, synthetic construct
  source 1..20: mol_type = other DNA
gttgaggcagctgtgaaaga

SEQ ID NO: 14830 - DNA, 20 bp, synthetic construct
  source 1..20: mol_type = other DNA
ctcttcttcgttacagcaga

SEQ ID NO: 14831 - DNA, 20 bp, synthetic construct
  source 1..20: mol_type = other DNA
tgggctgatagtcagcagct

SEQ ID NO: 14832 - DNA, 20 bp, synthetic construct
  source 1..20: mol_type = other DNA
gacctcatagaggtagctgg

SEQ ID NO: 14833 - DNA, 20 bp, synthetic construct
  source 1..20: mol_type = other DNA
ttaccattgctcagtgacag

SEQ ID NO: 14834 - DNA, 20 bp, synthetic construct
  source 1..20: mol_type = other DNA
acttgctgctggtgattctt

SEQ ID NO: 14835 - DNA, 20 bp, synthetic construct
  source 1..20: mol_type = other DNA
ctgctgtgtggtagaatctg

SEQ ID NO: 14836 - DNA, 20 bp, synthetic construct
  source 1..20: mol_type = other DNA
tggtatgtcaggcttctcag

SEQ ID NO: 14837 - DNA, 20 bp, synthetic construct
  source 1..20: mol_type = other DNA
agcgcttggtgatgtgcttt

SEQ ID NO: 14838 - DNA, 20 bp, synthetic construct
  source 1..20: mol_type = other DNA
tctgtcacctgcatagcttg

SEQ ID NO: 14839 - DNA, 20 bp, synthetic construct
  source 1..20: mol_type = other DNA
catagaatcctcccaacaac

SEQ ID NO: 14840 - DNA, 20 bp, synthetic construct
  source 1..20: mol_type = other DNA
ttgtctccgatgtaatcgtc

SEQ ID NO: 14841 - DNA, 20 bp, synthetic construct
  source 1..20: mol_type = other DNA
tcttgacgcattgtaggttg

SEQ ID NO: 14842 - DNA, 20 bp, synthetic construct
  source 1..20: mol_type = other DNA
cacgcggagagccttgaccg

SEQ ID NO: 14843 - DNA, 20 bp, synthetic construct
  source 1..20: mol_type = other DNA
ggaaggcgcgaacctgttcg

SEQ ID NO: 14844 - DNA, 20 bp, synthetic construct
  source 1..20: mol_type = other DNA
caagaagaataatgcgacga

SEQ ID NO: 14845 - DNA, 20 bp, synthetic construct
  source 1..20: mol_type = other DNA
cagcactttcttctggaatg

SEQ ID NO: 14846 - DNA, 20 bp, synthetic construct
  source 1..20: mol_type = other DNA
cagaagatcagataagccaa

SEQ ID NO: 14847 - DNA, 20 bp, synthetic construct
  source 1..20: mol_type = other DNA
tattagaatcaccaagggca

SEQ ID NO: 14848 - DNA, 20 bp, synthetic construct
  source 1..20: mol_type = other DNA
atattgtactaggctcctgg

SEQ ID NO: 14849 - DNA, 20 bp, synthetic construct
  source 1..20: mol_type = other DNA
ggactttacaaaacagactc

SEQ ID NO: 14850 - DNA, 20 bp, synthetic construct
  source 1..20: mol_type = other DNA
ctgggcagttataggtccca

SEQ ID NO: 14851 - DNA, 20 bp, synthetic construct
  source 1..20: mol_type = other DNA
tgttgattctcagtgtgctg

SEQ ID NO: 14852 - DNA, 20 bp, synthetic construct
  source 1..20: mol_type = other DNA
acccgcaggatgctgtgcac

SEQ ID NO: 14853 - DNA, 20 bp, synthetic construct
  source 1..20: mol_type = other DNA
gtgaaaacaaggaacattcc

SEQ ID NO: 14854 - DNA, 20 bp, synthetic construct
  source 1..20: mol_type = other DNA
attgtaggaatacttgcagc

SEQ ID NO: 14855 - DNA, 20 bp, synthetic construct
  source 1..20: mol_type = other DNA
atatagaaaacgagcagtgc

SEQ ID NO: 14856 - DNA, 20 bp, synthetic construct
  source 1..20: mol_type = other DNA
ccagatgttgaccacatggc

SEQ ID NO: 14857 - DNA, 20 bp, synthetic construct
  source 1..20: mol_type = other DNA
gattacagaggtctgtgact

SEQ ID NO: 14858 - DNA, 20 bp, synthetic construct
  source 1..20: mol_type = other DNA
atcgcctttgagggaagact

SEQ ID NO: 14859 - DNA, 20 bp, synthetic construct
  source 1..20: mol_type = other DNA
ggatcaggaccaggatactg

SEQ ID NO: 14860 - DNA, 20 bp, synthetic construct
  source 1..20: mol_type = other DNA
cccggacaccgggctgaact

SEQ ID NO: 14861 - DNA, 20 bp, synthetic construct
  source 1..20: mol_type = other DNA
catccagtagataaagccag

SEQ ID NO: 14862 - DNA, 20 bp, synthetic construct
  source 1..20: mol_type = other DNA
aactggaaacaccctgccta

SEQ ID NO: 14863 - DNA, 20 bp, synthetic construct
  source 1..20: mol_type = other DNA
gccagctgtgagggtgtgac

SEQ ID NO: 14864 - DNA, 20 bp, synthetic construct
  source 1..20: mol_type = other DNA
ccgctgtgctgtattatgaa

SEQ ID NO: 14865 - DNA, 20 bp, synthetic construct
  source 1..20: mol_type = other DNA
ggccttgtcttttcatagga

SEQ ID NO: 14866 - DNA, 20 bp, synthetic construct
  source 1..20: mol_type = other DNA
tttggcgatatccctcatgc

SEQ ID NO: 14867 - DNA, 20 bp, synthetic construct
  source 1..20: mol_type = other DNA
acgtggaatacacctgcaaa

SEQ ID NO: 14868 - DNA, 20 bp, synthetic construct
  source 1..20: mol_type = other DNA
tgtgcctccatattagtaac

SEQ ID NO: 14869 - DNA, 20 bp, synthetic construct
  source 1..20: mol_type = other DNA
ctggcacaatcacctttgag

SEQ ID NO: 14870 - DNA, 20 bp, synthetic construct
  source 1..20: mol_type = other DNA
ctcgggcttgtgactcaggt

SEQ ID NO: 14871 - DNA, 20 bp, synthetic construct
  source 1..20: mol_type = other DNA
ctgttccgacttggtttgtc

SEQ ID NO: 14872 - DNA, 20 bp, synthetic construct
  source 1..20: mol_type = other DNA
ttattatcactaagtggccc

SEQ ID NO: 14873 - DNA, 20 bp, synthetic construct
  source 1..20: mol_type = other DNA
ccagacatcatagtcagcac

SEQ ID NO: 14874 - DNA, 20 bp, synthetic construct
  source 1..20: mol_type = other DNA
tgtgattatcccagcttaag

SEQ ID NO: 14875 - DNA, 20 bp, synthetic construct
  source 1..20: mol_type = other DNA
cttaggttctgggtaaccgt

SEQ ID NO: 14876 - DNA, 20 bp, synthetic construct
  source 1..20: mol_type = other DNA
ctgtagctccaaaaagagac

SEQ ID NO: 14877 - DNA, 20 bp, synthetic construct
  source 1..20: mol_type = other DNA
agggcgcccagatgtagata

SEQ ID NO: 14878 - DNA, 20 bp, synthetic construct
  source 1..20: mol_type = other DNA
ggcattgcttgtaccatacc

SEQ ID NO: 14879 - DNA, 20 bp, synthetic construct
  source 1..20: mol_type = other DNA
tggtgtggcaggcataggat

SEQ ID NO: 14880 - DNA, 20 bp, synthetic construct
  source 1..20: mol_type = other DNA
catttgttggaagacagaca

SEQ ID NO: 14881 - DNA, 20 bp, synthetic construct
  source 1..20: mol_type = other DNA
gttttcttcaggacaaggta

SEQ ID NO: 14882 - DNA, 20 bp, synthetic construct
  source 1..20: mol_type = other DNA
gcccttgacaatgtagttgg

SEQ ID NO: 14883 - DNA, 20 bp, synthetic construct
  source 1..20: mol_type = other DNA
gtgttttggaaggtagcgtt

SEQ ID NO: 14884 - DNA, 20 bp, synthetic construct
  source 1..20: mol_type = other DNA
ccatcatgtaggttgccgca

SEQ ID NO: 14885 - DNA, 20 bp, synthetic construct
  source 1..20: mol_type = other DNA
tgtattagtgtcctgagctc

SEQ ID NO: 14886 - DNA, 20 bp, synthetic construct
  source 1..20: mol_type = other DNA
tgtgtagggtgtcctgaacc

SEQ ID NO: 14887 - DNA, 20 bp, synthetic construct
  source 1..20: mol_type = other DNA
acccaagccaaaactgatcc

SEQ ID NO: 14888 - DNA, 20 bp, synthetic construct
  source 1..20: mol_type = other DNA
gggactgtctaaggtgctct

SEQ ID NO: 14889 - DNA, 20 bp, synthetic construct
  source 1..20: mol_type = other DNA
acacattgtagtgggcagtg

SEQ ID NO: 14890 - DNA, 20 bp, synthetic construct
  source 1..20: mol_type = other DNA
acaaagccaaagcaccagtt

SEQ ID NO: 14891 - DNA, 20 bp, synthetic construct
  source 1..20: mol_type = other DNA
cttgtagactgtgccaaaag

SEQ ID NO: 14892 - DNA, 20 bp, synthetic construct
  source 1..20: mol_type = other DNA
agaacgcatccagtaggacc

SEQ ID NO: 14893 - DNA, 20 bp, synthetic construct
  source 1..20: mol_type = other DNA
gtcttcctcaattccaatcc

SEQ ID NO: 14894 - DNA, 20 bp, synthetic construct
  source 1..20: mol_type = other DNA
cgccctgccttgtttgcgtc

SEQ ID NO: 14895 - DNA, 20 bp, synthetic construct
  source 1..20: mol_type = other DNA
gcttcttagtgagcttttct

SEQ ID NO: 14896 - DNA, 20 bp, synthetic construct
  source 1..20: mol_type = other DNA
caggtttactctcgcagtta

SEQ ID NO: 14897 - DNA, 20 bp, synthetic construct
  source 1..20: mol_type = other DNA
ccgtaagtgatcctgtaata

SEQ ID NO: 14898 - DNA, 20 bp, synthetic construct
  source 1..20: mol_type = other DNA
aaaccctcaacggcaactgg

SEQ ID NO: 14899 - DNA, 20 bp, synthetic construct
  source 1..20: mol_type = other DNA
tgtagaaggtatacacaacc

SEQ ID NO: 14900 - DNA, 20 bp, synthetic construct
  source 1..20: mol_type = other DNA
gtctgccttgaacacagaag

SEQ ID NO: 14901 - DNA, 20 bp, synthetic construct
  source 1..20: mol_type = other DNA
tacactgacttgccgtttca

SEQ ID NO: 14902 - DNA, 20 bp, synthetic construct
  source 1..20: mol_type = other DNA
gaaatctggaacgaatgtct

SEQ ID NO: 14903 - DNA, 20 bp, synthetic construct
  source 1..20: mol_type = other DNA
aacgacaactgagagagagg

SEQ ID NO: 14904 - DNA, 20 bp, synthetic construct
  source 1..20: mol_type = other DNA
cagtgtacaaagcttgagac

SEQ ID NO: 14905 - DNA, 20 bp, synthetic construct
  source 1..20: mol_type = other DNA
actccttccagaaacaaatg

SEQ ID NO: 14906 - DNA, 20 bp, synthetic construct
  source 1..20: mol_type = other DNA
gatctaagagaggttttgga

SEQ ID NO: 14907 - DNA, 20 bp, synthetic construct
  source 1..20: mol_type = other DNA
cttggttaacagggtgtaga

SEQ ID NO: 14908 - DNA, 20 bp, synthetic construct
  source 1..20: mol_type = other DNA
gatccctgctccgatgtaga

SEQ ID NO: 14909 - DNA, 20 bp, synthetic construct
  source 1..20: mol_type = other DNA
ggcagtgctcaaataagcct

SEQ ID NO: 14910 - DNA, 20 bp, synthetic construct
  source 1..20: mol_type = other DNA
atagttggagcgctttgtca

SEQ ID NO: 14911 - DNA, 20 bp, synthetic construct
  source 1..20: mol_type = other DNA
ggtgacaggttttccatttc

SEQ ID NO: 14912 - DNA, 20 bp, synthetic construct
  source 1..20: mol_type = other DNA
cagcaggacgtcaaagcact

SEQ ID NO: 14913 - DNA, 20 bp, synthetic construct
  source 1..20: mol_type = other DNA
gtctgcaccctgatatgatg

SEQ ID NO: 14914 - DNA, 20 bp, synthetic construct
  source 1..20: mol_type = other DNA
caggacacctgaatctgccg

SEQ ID NO: 14915 - DNA, 20 bp, synthetic construct
  source 1..20: mol_type = other DNA
cccgttgacacggttagttt

SEQ ID NO: 14916 - DNA, 20 bp, synthetic construct
  source 1..20: mol_type = other DNA
catgacaccatggactccca

SEQ ID NO: 14917 - DNA, 20 bp, synthetic construct
  source 1..20: mol_type = other DNA
gacaaaggcaaagaagatga

SEQ ID NO: 14918 - DNA, 20 bp, synthetic construct
  source 1..20: mol_type = other DNA
tcctagagtctatagagtcg

SEQ ID NO: 14919 - DNA, 20 bp, synthetic construct
  source 1..20: mol_type = other DNA
cactcaaataccatagtgtg

SEQ ID NO: 14920 - DNA, 20 bp, synthetic construct
  source 1..20: mol_type = other DNA
agtcttgaaggcatgtgaaa

SEQ ID NO: 14921 - DNA, 20 bp, synthetic construct
  source 1..20: mol_type = other DNA
tggtctgttgatctctgagg

SEQ ID NO: 14922 - DNA, 20 bp, synthetic construct
  source 1..20: mol_type = other DNA
tgtgccttgtgcctcgaaga

SEQ ID NO: 14923 - DNA, 20 bp, synthetic construct
  source 1..20: mol_type = other DNA
tgctcatcagaatgtgggag

SEQ ID NO: 14924 - DNA, 20 bp, synthetic construct
  source 1..20: mol_type = other DNA
gttcttcaggttgaggtgtc

SEQ ID NO: 14925 - DNA, 20 bp, synthetic construct
  source 1..20: mol_type = other DNA
tgccgtcagcctctttttgg

SEQ ID NO: 14926 - DNA, 20 bp, synthetic construct
  source 1..20: mol_type = other DNA
tgagcctaaattcgtgggat

SEQ ID NO: 14927 - DNA, 20 bp, synthetic construct
  source 1..20: mol_type = other DNA
ccaggatgcttgactcacgg

SEQ ID NO: 14928 - DNA, 20 bp, synthetic construct
  source 1..20: mol_type = other DNA
tgcaggaactccttaaagct

SEQ ID NO: 14929 - DNA, 20 bp, synthetic construct
  source 1..20: mol_type = other DNA
ctggctatagcatgagaatg

SEQ ID NO: 14930 - DNA, 20 bp, synthetic construct
  source 1..20: mol_type = other DNA
catgagattttgtggagcct

SEQ ID NO: 14931 - DNA, 20 bp, synthetic construct
  source 1..20: mol_type = other DNA
tcagatctgtgaagacacgc

SEQ ID NO: 14932 - DNA, 20 bp, synthetic construct
  source 1..20: mol_type = other DNA
gcgtggacaccttccggtag

SEQ ID NO: 14933 - DNA, 20 bp, synthetic construct
  source 1..20: mol_type = other DNA
accatcatttctcacagtca

SEQ ID NO: 14934 - DNA, 20 bp, synthetic construct
  source 1..20: mol_type = other DNA
agactctgagaagttgaggt

SEQ ID NO: 14935 - DNA, 20 bp, synthetic construct
  source 1..20: mol_type = other DNA
atccacatagatgaggtagc

SEQ ID NO: 14936 - DNA, 20 bp, synthetic construct
  source 1..20: mol_type = other DNA
tctcgcactggcacgctgag

SEQ ID NO: 14937 - DNA, 20 bp, synthetic construct
  source 1..20: mol_type = other DNA
cttcatcacagatattgctc

SEQ ID NO: 14938 - DNA, 20 bp, synthetic construct
  source 1..20: mol_type = other DNA
ctcagcaagtcttctaagtc

SEQ ID NO: 14939 - DNA, 20 bp, synthetic construct
  source 1..20: mol_type = other DNA
tggtggaacaatcagctaga

SEQ ID NO: 14940 - DNA, 20 bp, synthetic construct
  source 1..20: mol_type = other DNA
ggagatatattggttgcggg

SEQ ID NO: 14941 - DNA, 20 bp, synthetic construct
  source 1..20: mol_type = other DNA
agttctatgttgggtcctgg

SEQ ID NO: 14942 - DNA, 20 bp, synthetic construct
  source 1..20: mol_type = other DNA
atctttcatttgctcgatgg

SEQ ID NO: 14943 - DNA, 20 bp, synthetic construct
  source 1..20: mol_type = other DNA
gaattgtgaagcttgcagta

SEQ ID NO: 14944 - DNA, 20 bp, synthetic construct
  source 1..20: mol_type = other DNA
ctcataatctgagattcgga

SEQ ID NO: 14945 - DNA, 20 bp, synthetic construct
  source 1..20: mol_type = other DNA
gatgggtgcatagatccctg

SEQ ID NO: 14946 - DNA, 20 bp, synthetic construct
  source 1..20: mol_type = other DNA
catttttttctcaggcctgc

SEQ ID NO: 14947 - DNA, 20 bp, synthetic construct
  source 1..20: mol_type = other DNA
tttcaggatgacatctcggc

SEQ ID NO: 14948 - DNA, 20 bp, synthetic construct
  source 1..20: mol_type = other DNA
atcatcattccacaccactg

SEQ ID NO: 14949 - DNA, 20 bp, synthetic construct
  source 1..20: mol_type = other DNA
cacttcgggtccaggatgaa

SEQ ID NO: 14950 - DNA, 20 bp, synthetic construct
  source 1..20: mol_type = other DNA
gctaggaaagacaatggtgg

SEQ ID NO: 14951 - DNA, 20 bp, synthetic construct
  source 1..20: mol_type = other DNA
cttgtaatctgcaaccactg

SEQ ID NO: 14952 - DNA, 20 bp, synthetic construct
  source 1..20: mol_type = other DNA
ctcaaacttgggctccataa

SEQ ID NO: 14953 - DNA, 20 bp, synthetic construct
  source 1..20: mol_type = other DNA
gtgggcgagctgagtaaagc

SEQ ID NO: 14954 - DNA, 20 bp, synthetic construct
  source 1..20: mol_type = other DNA
gaggccaaagttgttgatgc

SEQ ID NO: 14955 - DNA, 20 bp, synthetic construct
  source 1..20: mol_type = other DNA
caaagaagagcttcacatag

SEQ ID NO: 14956 - DNA, 20 bp, synthetic construct
  source 1..20: mol_type = other DNA
gcaagcacctggcatgatag

SEQ ID NO: 14957 - DNA, 20 bp, synthetic construct
  source 1..20: mol_type = other DNA
cttcccagcttttgtagcca

SEQ ID NO: 14958 - DNA, 20 bp, synthetic construct
  source 1..20: mol_type = other DNA
tcctcctatcttccggattc

SEQ ID NO: 14959 - DNA, 20 bp, synthetic construct
  source 1..20: mol_type = other DNA
atgtttgacgtaggaggtgc

SEQ ID NO: 14960 - DNA, 20 bp, synthetic construct
  source 1..20: mol_type = other DNA
aaaaggtgccaggcatttta

SEQ ID NO: 14961 - DNA, 20 bp, synthetic construct
  source 1..20: mol_type = other DNA
cagctcatcacctccagtag

SEQ ID NO: 14962 - DNA, 20 bp, synthetic construct
  source 1..20: mol_type = other DNA
taagtacacacggtttccgg

SEQ ID NO: 14963 - DNA, 20 bp, synthetic construct
  source 1..20: mol_type = other DNA
aacctacagggtgtttatgg

SEQ ID NO: 14964 - DNA, 20 bp, synthetic construct
  source 1..20: mol_type = other DNA
tgtgagctttagtttcccaa

SEQ ID NO: 14965 - DNA, 20 bp, synthetic construct
  source 1..20: mol_type = other DNA
tttggatcagggattaacac

SEQ ID NO: 14966 - DNA, 20 bp, synthetic construct
  source 1..20: mol_type = other DNA
acaactttgtaacacccagg

SEQ ID NO: 14967 - DNA, 20 bp, synthetic construct
  source 1..20: mol_type = other DNA
ctcaggtgaatcggctgtgt

SEQ ID NO: 14968 - DNA, 20 bp, synthetic construct
  source 1..20: mol_type = other DNA
catgtctccaggaatccaac

SEQ ID NO: 14969 - DNA, 20 bp, synthetic construct
  source 1..20: mol_type = other DNA
gatagatgcagaagtactcc

SEQ ID NO: 14970 - DNA, 20 bp, synthetic construct
  source 1..20: mol_type = other DNA
agcctccggattgttaacgt

SEQ ID NO: 14971 - DNA, 20 bp, synthetic construct
  source 1..20: mol_type = other DNA
gactttatcgcagctctcag

SEQ ID NO: 14972 - DNA, 20 bp, synthetic construct
  source 1..20: mol_type = other DNA
aggaccgacacaccaatgat

SEQ ID NO: 14973 - DNA, 20 bp, synthetic construct
  source 1..20: mol_type = other DNA
ttccagagcaaatgcagcaa

SEQ ID NO: 14974 - DNA, 20 bp, synthetic construct
  source 1..20: mol_type = other DNA
ccacggcccatctgcgtcac

SEQ ID NO: 14975 - DNA, 20 bp, synthetic construct
  source 1..20: mol_type = other DNA
agctgggcagttactacaag

SEQ ID NO: 14976 - DNA, 20 bp, synthetic construct
  source 1..20: mol_type = other DNA
ggtcgacagatgccacgttt

SEQ ID NO: 14977 - DNA, 20 bp, synthetic construct
  source 1..20: mol_type = other DNA
gttcagctccgttttcacgg

SEQ ID NO: 14978 - DNA, 20 bp, synthetic construct
  source 1..20: mol_type = other DNA
tcctccagaaattcctgact

SEQ ID NO: 14979 - DNA, 20 bp, synthetic construct
  source 1..20: mol_type = other DNA
cttcgtgaaacatctccgta

SEQ ID NO: 14980 - DNA, 20 bp, synthetic construct
  source 1..20: mol_type = other DNA
acaaacaaatgctttctccg

SEQ ID NO: 14981 - DNA, 20 bp, synthetic construct
  source 1..20: mol_type = other DNA
aagataagctagtgactgtc

SEQ ID NO: 14982 - DNA, 20 bp, synthetic construct
  source 1..20: mol_type = other DNA
cagtgtggctgtttggcaac

SEQ ID NO: 14983 - DNA, 20 bp, synthetic construct
  source 1..20: mol_type = other DNA
tgagtatggaggagatgtgt

SEQ ID NO: 14984 - DNA, 20 bp, synthetic construct
  source 1..20: mol_type = other DNA
aaagctgaggtgtccatagg

SEQ ID NO: 14985 - DNA, 20 bp, synthetic construct
  source 1..20: mol_type = other DNA
gatgaaccgtggcatttcca

SEQ ID NO: 14986 - DNA, 20 bp, synthetic construct
  source 1..20: mol_type = other DNA
agcacattgtacaccagctt

SEQ ID NO: 14987 - DNA, 20 bp, synthetic construct
  source 1..20: mol_type = other DNA
accatccctagcctgtattg

SEQ ID NO: 14988 - DNA, 20 bp, synthetic construct
  source 1..20: mol_type = other DNA
ttctgctgcagaagcacgtt

SEQ ID NO: 14989 - DNA, 20 bp, synthetic construct
  source 1..20: mol_type = other DNA
tgcagtgtaacctcaacgct

SEQ ID NO: 14990 - DNA, 20 bp, synthetic construct
  source 1..20: mol_type = other DNA
ggcaagcatagctggcttct

SEQ ID NO: 14991 - DNA, 20 bp, synthetic construct
  source 1..20: mol_type = other DNA
accggtcactgcctcctttt

SEQ ID NO: 14992 - DNA, 20 bp, synthetic construct
  source 1..20: mol_type = other DNA
cgatcatgttcctgtagtcg

SEQ ID NO: 14993 - DNA, 20 bp, synthetic construct
  source 1..20: mol_type = other DNA
acttataagtgcacgtctac

SEQ ID NO: 14994 - DNA, 20 bp, synthetic construct
  source 1..20: mol_type = other DNA
agaggaagagaaacagtcat

SEQ ID NO: 14995 - DNA, 20 bp, synthetic construct
  source 1..20: mol_type = other DNA
gctcgcactgcacatctagg

SEQ ID NO: 14996 - DNA, 20 bp, synthetic construct
  source 1..20: mol_type = other DNA
tcacctcccaggatgtcaat

SEQ ID NO: 14997 - DNA, 20 bp, synthetic construct
  source 1..20: mol_type = other DNA
aaggccttggttttagtgat

SEQ ID NO: 14998 - DNA, 20 bp, synthetic construct
  source 1..20: mol_type = other DNA
ctccaccacttaaagaaggc

SEQ ID NO: 14999 - DNA, 20 bp, synthetic construct
  source 1..20: mol_type = other DNA
gcaactctaaacatgtgaga

SEQ ID NO: 15000 - DNA, 20 bp, synthetic construct
  source 1..20: mol_type = other DNA
tctagggttgttttgtgtgc

SEQ ID NO: 15001 - DNA, 20 bp, synthetic construct
  source 1..20: mol_type = other DNA
ctaatgctgatgcaggtaca

SEQ ID NO: 15002 - DNA, 20 bp, synthetic construct
  source 1..20: mol_type = other DNA
gtgtcttcaggattgtgact

SEQ ID NO: 15003 - DNA, 20 bp, synthetic construct
  source 1..20: mol_type = other DNA
accttctttcacagcatccc

SEQ ID NO: 15004 - DNA, 20 bp, synthetic construct
  source 1..20: mol_type = other DNA
tgtatccattcagcttgagg

SEQ ID NO: 15005 - DNA, 20 bp, synthetic construct
  source 1..20: mol_type = other DNA
taagacgttcgggtgggatc

SEQ ID NO: 15006 - DNA, 20 bp, synthetic construct
  source 1..20: mol_type = other DNA
aaatcatggccttaagcatg

SEQ ID NO: 15007 - DNA, 20 bp, synthetic construct
  source 1..20: mol_type = other DNA
gagctgggtggcatgaacta

SEQ ID NO: 15008 - DNA, 20 bp, synthetic construct
  source 1..20: mol_type = other DNA
tgatgttgaagagggcacct

SEQ ID NO: 15009 - DNA, 20 bp, synthetic construct
  source 1..20: mol_type = other DNA
tgttcagttcccttttctac

SEQ ID NO: 15010 - DNA, 20 bp, synthetic construct
  source 1..20: mol_type = other DNA
ttttcttcacggaaacaggg

SEQ ID NO: 15011 - DNA, 20 bp, synthetic construct
  source 1..20: mol_type = other DNA
agttgactttgtgcagggca

SEQ ID NO: 15012 - DNA, 20 bp, synthetic construct
  source 1..20: mol_type = other DNA
attttccaccagggaggtgt

SEQ ID NO: 15013 - DNA, 20 bp, synthetic construct
  source 1..20: mol_type = other DNA
tcagggatgagacatttaca

SEQ ID NO: 15014 - DNA, 20 bp, synthetic construct
  source 1..20: mol_type = other DNA
ggtggtgccagcacttgttt

SEQ ID NO: 15015 - DNA, 20 bp, synthetic construct
  source 1..20: mol_type = other DNA
acttcttcacgcaggtggca

SEQ ID NO: 15016 - DNA, 20 bp, synthetic construct
  source 1..20: mol_type = other DNA
atgcgggatacctcaagttg

SEQ ID NO: 15017 - DNA, 20 bp, synthetic construct
  source 1..20: mol_type = other DNA
acatgtagaagtctcatcga

SEQ ID NO: 15018 - DNA, 20 bp, synthetic construct
  source 1..20: mol_type = other DNA
gtaaacggctcagatcttag

SEQ ID NO: 15019 - DNA, 20 bp, synthetic construct
  source 1..20: mol_type = other DNA
cagactaatccggaacattc

SEQ ID NO: 15020 - DNA, 20 bp, synthetic construct
  source 1..20: mol_type = other DNA
tcccactcgagactaatctt

SEQ ID NO: 15021 - DNA, 20 bp, synthetic construct
  source 1..20: mol_type = other DNA
aatccggacttgaatacacg

SEQ ID NO: 15022 - DNA, 20 bp, synthetic construct
  source 1..20: mol_type = other DNA
agcgaataacccaacgaccg

SEQ ID NO: 15023 - DNA, 20 bp, synthetic construct
  source 1..20: mol_type = other DNA
ttccagatgatgccatacgt

SEQ ID NO: 15024 - DNA, 20 bp, synthetic construct
  source 1..20: mol_type = other DNA
atagggtaagcctattgcaa

SEQ ID NO: 15025 - DNA, 20 bp, synthetic construct
  source 1..20: mol_type = other DNA
gggcgtgtcattcagcactt

SEQ ID NO: 15026 - DNA, 20 bp, synthetic construct
  source 1..20: mol_type = other DNA
ggtcttctttgccttttgtt

SEQ ID NO: 15027 - DNA, 20 bp, synthetic construct
  source 1..20: mol_type = other DNA
tttgatagtaaccaggcgtc

SEQ ID NO: 15028 - DNA, 20 bp, synthetic construct
  source 1..20: mol_type = other DNA
caaaggcagtgtagacttta

SEQ ID NO: 15029 - DNA, 20 bp, synthetic construct
  source 1..20: mol_type = other DNA
tagactgtgatgtggtaggc

SEQ ID NO: 15030 - DNA, 20 bp, synthetic construct
  source 1..20: mol_type = other DNA
ccacattattttcctggtac

SEQ ID NO: 15031 - DNA, 20 bp, synthetic construct
  source 1..20: mol_type = other DNA
agggagtgttccaagagctg

SEQ ID NO: 15032 - DNA, 20 bp, synthetic construct
  source 1..20: mol_type = other DNA
gcctctgcaccgagtcatcg

SEQ ID NO: 15033 - DNA, 20 bp, synthetic construct
  source 1..20: mol_type = other DNA
aggacctcaaagtcattcta

SEQ ID NO: 15034 - DNA, 20 bp, synthetic construct
  source 1..20: mol_type = other DNA
gagctgtttggttcttgact

SEQ ID NO: 15035 - DNA, 20 bp, synthetic construct
  source 1..20: mol_type = other DNA
gtgcccaaaggcacaaagca

SEQ ID NO: 15036 - DNA, 20 bp, synthetic construct
  source 1..20: mol_type = other DNA
ctgagaagctggaaatgaga

SEQ ID NO: 15037 - DNA, 20 bp, synthetic construct
  source 1..20: mol_type = other DNA
gagccctccaaactgatctg

SEQ ID NO: 15038 - DNA, 20 bp, synthetic construct
  source 1..20: mol_type = other DNA
cattttctgcatggctttct

SEQ ID NO: 15039 - DNA, 20 bp, synthetic construct
  source 1..20: mol_type = other DNA
gataagcaggtctccaactg

SEQ ID NO: 15040 - DNA, 20 bp, synthetic construct
  source 1..20: mol_type = other DNA
tccgtggccgacatggagat

SEQ ID NO: 15041 - DNA, 20 bp, synthetic construct
  source 1..20: mol_type = other DNA
ccgtgtctcgatggtcttga

SEQ ID NO: 15042 - DNA, 20 bp, synthetic construct
  source 1..20: mol_type = other DNA
gagacaagatctctgctatt

SEQ ID NO: 15043 - DNA, 20 bp, synthetic construct
  source 1..20: mol_type = other DNA
gggctctgctcaatgtcttt

SEQ ID NO: 15044 - DNA, 20 bp, synthetic construct
  source 1..20: mol_type = other DNA
cttcctaggaatcgtgggca

SEQ ID NO: 15045 - DNA, 20 bp, synthetic construct
  source 1..20: mol_type = other DNA
cactcacatccgtctcaagg

SEQ ID NO: 15046 - DNA, 20 bp, synthetic construct
  source 1..20: mol_type = other DNA
ggtttatgaaatccaggatg

SEQ ID NO: 15047 - DNA, 20 bp, synthetic construct
  source 1..20: mol_type = other DNA
agagcccactgtgttgatgc

SEQ ID NO: 15048 - DNA, 20 bp, synthetic construct
  source 1..20: mol_type = other DNA
ctgcagtgttgatgcattcg

SEQ ID NO: 15049 - DNA, 20 bp, synthetic construct
  source 1..20: mol_type = other DNA
cgccacggtggaagtagtct

SEQ ID NO: 15050 - DNA, 20 bp, synthetic construct
  source 1..20: mol_type = other DNA
ttggaggagtaatgatagtc

SEQ ID NO: 15051 - DNA, 20 bp, synthetic construct
  source 1..20: mol_type = other DNA
aaagcacagaaaacctcaag

SEQ ID NO: 15052 - DNA, 20 bp, synthetic construct
  source 1..20: mol_type = other DNA
cagtatcaaattacccttcc

SEQ ID NO: 15053 - DNA, 20 bp, synthetic construct
  source 1..20: mol_type = other DNA
gaagctgtaacagatgagat

SEQ ID NO: 15054 - DNA, 20 bp, synthetic construct
  source 1..20: mol_type = other DNA
gattagacttgaacacgtgt

SEQ ID NO: 15055 - DNA, 20 bp, synthetic construct
  source 1..20: mol_type = other DNA
ggctgtgtcgagctgtaggg

SEQ ID NO: 15056 - DNA, 20 bp, synthetic construct
  source 1..20: mol_type = other DNA
cagcagtcttccctgatttt

SEQ ID NO: 15057 - DNA, 20 bp, synthetic construct
  source 1..20: mol_type = other DNA
aaagtacctccattcgggta

SEQ ID NO: 15058 - DNA, 20 bp, synthetic construct
  source 1..20: mol_type = other DNA
attcagagacttgtcatggc

SEQ ID NO: 15059 - DNA, 20 bp, synthetic construct
  source 1..20: mol_type = other DNA
gatgcactatggacaagaat

SEQ ID NO: 15060 - DNA, 20 bp, synthetic construct
  source 1..20: mol_type = other DNA
tggcacttgggtagctttca

SEQ ID NO: 15061 - DNA, 20 bp, synthetic construct
  source 1..20: mol_type = other DNA
tttggcatgagtgtgcaaca

SEQ ID NO: 15062 - DNA, 20 bp, synthetic construct
  source 1..20: mol_type = other DNA
ccttctgctgattcttgttt

SEQ ID NO: 15063 - DNA, 20 bp, synthetic construct
  source 1..20: mol_type = other DNA
ttacttttccaaggacggtt

SEQ ID NO: 15064 - DNA, 20 bp, synthetic construct
  source 1..20: mol_type = other DNA
gatcgcacacatttgtcgtg

SEQ ID NO: 15065 - DNA, 20 bp, synthetic construct
  source 1..20: mol_type = other DNA
ttactgtcacacgcttttgg

SEQ ID NO: 15066 - DNA, 20 bp, synthetic construct
  source 1..20: mol_type = other DNA
gcatcaactttgtggccaat

SEQ ID NO: 15067 - DNA, 20 bp, synthetic construct
  source 1..20: mol_type = other DNA
gcaccaaaacaaacttttgc

SEQ ID NO: 15068 - DNA, 20 bp, synthetic construct
  source 1..20: mol_type = other DNA
acatgtcttcacattcacct

SEQ ID NO: 15069 - DNA, 20 bp, synthetic construct
  source 1..20: mol_type = other DNA
aatctgatcgaaagtctcgt

SEQ ID NO: 15070 - DNA, 20 bp, synthetic construct
  source 1..20: mol_type = other DNA
ccggcccaacttgctgaagt

SEQ ID NO: 15071 - DNA, 20 bp, synthetic construct
  source 1..20: mol_type = other DNA
ctcttctgcaagatttgtcg

SEQ ID NO: 15072 - DNA, 20 bp, synthetic construct
  source 1..20: mol_type = other DNA
gggtcgtggtagtctccata

SEQ ID NO: 15073 - DNA, 20 bp, synthetic construct
  source 1..20: mol_type = other DNA
agctctcttcttcagacatg

SEQ ID NO: 15074 - DNA, 20 bp, synthetic construct
  source 1..20: mol_type = other DNA
tgtgggtgcaaaagtattct

SEQ ID NO: 15075 - DNA, 20 bp, synthetic construct
  source 1..20: mol_type = other DNA
ggaagtttagggtatatggc

SEQ ID NO: 15076 - DNA, 20 bp, synthetic construct
  source 1..20: mol_type = other DNA
aaggctgattttcctggtgt

SEQ ID NO: 15077 - DNA, 20 bp, synthetic construct
  source 1..20: mol_type = other DNA
catttatatgtccctgagtc

SEQ ID NO: 15078 - DNA, 20 bp, synthetic construct
  source 1..20: mol_type = other DNA
agaggtgacagggacttaaa

SEQ ID NO: 15079 - DNA, 20 bp, synthetic construct
  source 1..20: mol_type = other DNA
ccagtccaggagcctaatga

SEQ ID NO: 15080 - DNA, 20 bp, synthetic construct
  source 1..20: mol_type = other DNA
ctgcacgcccttctcatagg

SEQ ID NO: 15081 - DNA, 20 bp, synthetic construct
  source 1..20: mol_type = other DNA
gcagtagttattatgtggcc

SEQ ID NO: 15082 - DNA, 20 bp, synthetic construct
  source 1..20: mol_type = other DNA
gtccacagatggacttttta

SEQ ID NO: 15083 - DNA, 20 bp, synthetic construct
  source 1..20: mol_type = other DNA
gctcttgacagtggtacttc

SEQ ID NO: 15084 - DNA, 20 bp, synthetic construct
  source 1..20: mol_type = other DNA
ttcccagacatttactcaag

SEQ ID NO: 15085 - DNA, 20 bp, synthetic construct
  source 1..20: mol_type = other DNA
gaaaaagggaaaatggcctg

SEQ ID NO: 15086 - DNA, 20 bp, synthetic construct
  source 1..20: mol_type = other DNA
ctgctgtttgttttctcgtt

SEQ ID NO: 15087 - DNA, 20 bp, synthetic construct
  source 1..20: mol_type = other DNA
gtggagaacgggtgtccaga

SEQ ID NO: 15088 - DNA, 20 bp, synthetic construct
  source 1..20: mol_type = other DNA
ggcagaaagtcgcagtatcg

SEQ ID NO: 15089 - DNA, 20 bp, synthetic construct
  source 1..20: mol_type = other DNA
cacatgagcgacaaactcaa

SEQ ID NO: 15090 - DNA, 20 bp, synthetic construct
  source 1..20: mol_type = other DNA
ccagcagcagaaagtccagc

SEQ ID NO: 15091 - DNA, 20 bp, synthetic construct
  source 1..20: mol_type = other DNA
tccttcttcacagtcaaatg

SEQ ID NO: 15092 - DNA, 20 bp, synthetic construct
  source 1..20: mol_type = other DNA
aaattgttctaggtcactgc

SEQ ID NO: 15093 - DNA, 20 bp, synthetic construct
  source 1..20: mol_type = other DNA
ctccatgttggacattacct

SEQ ID NO: 15094 - DNA, 20 bp, synthetic construct
  source 1..20: mol_type = other DNA
tcctaatgtatagtaggcct

SEQ ID NO: 15095 - DNA, 20 bp, synthetic construct
  source 1..20: mol_type = other DNA
ggttagtcgtttgactttgg

SEQ ID NO: 15096 - DNA, 20 bp, synthetic construct
  source 1..20: mol_type = other DNA
gaaggttgtagttaagtacc

SEQ ID NO: 15097 - DNA, 20 bp, synthetic construct
  source 1..20: mol_type = other DNA
gtagaatctgttctcattgg

SEQ ID NO: 15098 - DNA, 20 bp, synthetic construct
  source 1..20: mol_type = other DNA
gggagccggtggcataattt

SEQ ID NO: 15099 - DNA, 20 bp, synthetic construct
  source 1..20: mol_type = other DNA
cctgcgtcacactgctcaaa

SEQ ID NO: 15100 - DNA, 20 bp, synthetic construct
  source 1..20: mol_type = other DNA
tacacatcgtaagtttcctg

SEQ ID NO: 15101 - DNA, 20 bp, synthetic construct
  source 1..20: mol_type = other DNA
agggccatcttaacattgag

SEQ ID NO: 15102 - DNA, 20 bp, synthetic construct
  source 1..20: mol_type = other DNA
ctcgacgcgggctttgtcgt

SEQ ID NO: 15103 - DNA, 20 bp, synthetic construct
  source 1..20: mol_type = other DNA
gtcatctggatgaccaaggg

SEQ ID NO: 15104 - DNA, 20 bp, synthetic construct
  source 1..20: mol_type = other DNA
acactttgtctctgtcttct

SEQ ID NO: 15105 - DNA, 20 bp, synthetic construct
  source 1..20: mol_type = other DNA
tagttactgccacatatctg

SEQ ID NO: 15106 - DNA, 20 bp, synthetic construct
  source 1..20: mol_type = other DNA
catctgacagccttgtgccc

SEQ ID NO: 15107 - DNA, 20 bp, synthetic construct
  source 1..20: mol_type = other DNA
tgcagctctttgtagaggac

SEQ ID NO: 15108 - DNA, 20 bp, synthetic construct
  source 1..20: mol_type = other DNA
ggcaagggcgacgaagccac

SEQ ID NO: 15109 - DNA, 20 bp, synthetic construct
  source 1..20: mol_type = other DNA
tagtgcactctctgactcta

SEQ ID NO: 15110 - DNA, 20 bp, synthetic construct
  source 1..20: mol_type = other DNA
tgctgtgtggtagaatctgg

SEQ ID NO: 15111 - DNA, 20 bp, synthetic construct
  source 1..20: mol_type = other DNA
ttctgataaaccgagaacga

SEQ ID NO: 15112 - DNA, 20 bp, synthetic construct
  source 1..20: mol_type = other DNA
attacttagatgctgcatgc

SEQ ID NO: 15113 - DNA, 20 bp, synthetic construct
  source 1..20: mol_type = other DNA
cccagtggatcgggtgtaaa

SEQ ID NO: 15114 - DNA, 20 bp, synthetic construct
  source 1..20: mol_type = other DNA
gaagcgtttggcaatgtgct

SEQ ID NO: 15115 - DNA, 20 bp, synthetic construct
  source 1..20: mol_type = other DNA
gatggccttgttgcgctcaa

SEQ ID NO: 15116 - DNA, 20 bp, synthetic construct
  source 1..20: mol_type = other DNA
gggctgacaaaaggttaagg

SEQ ID NO: 15117 - DNA, 20 bp, synthetic construct
  source 1..20: mol_type = other DNA
ttcggagaagttgcagacgc

SEQ ID NO: 15118 - DNA, 20 bp, synthetic construct
  source 1..20: mol_type = other DNA
gcatctcggagcgctagggt

SEQ ID NO: 15119 - DNA, 20 bp, synthetic construct
  source 1..20: mol_type = other DNA
cctggcaagaaacgctgtca

SEQ ID NO: 15120 - DNA, 20 bp, synthetic construct
  source 1..20: mol_type = other DNA
gctactcttgccaacagtgc

SEQ ID NO: 15121 - DNA, 20 bp, synthetic construct
  source 1..20: mol_type = other DNA
ggcccacacatacagcttgg

SEQ ID NO: 15122 - DNA, 20 bp, synthetic construct
  source 1..20: mol_type = other DNA
cttgaatctcccgagttaat

SEQ ID NO: 15123 - DNA, 20 bp, synthetic construct
  source 1..20: mol_type = other DNA
ctttcatcccaatctcactg

SEQ ID NO: 15124 - DNA, 20 bp, synthetic construct
  source 1..20: mol_type = other DNA
gttgtaaatgcttcatcctg

SEQ ID NO: 15125 - DNA, 20 bp, synthetic construct
  source 1..20: mol_type = other DNA
actgagtagactatgtgcct

SEQ ID NO: 15126 - DNA, 20 bp, synthetic construct
  source 1..20: mol_type = other DNA
ttgcttctggaaaggaaact

SEQ ID NO: 15127 - DNA, 20 bp, synthetic construct
  source 1..20: mol_type = other DNA
gcctttctatgctggtcaca

SEQ ID NO: 15128 - DNA, 20 bp, synthetic construct
  source 1..20: mol_type = other DNA
tgctcttctcattgtctagg

SEQ ID NO: 15129 - DNA, 20 bp, synthetic construct
  source 1..20: mol_type = other DNA
atgctattttccaacttgcc

SEQ ID NO: 15130 - DNA, 20 bp, synthetic construct
  source 1..20: mol_type = other DNA
acttttactcacaggatggt

SEQ ID NO: 15131 - DNA, 20 bp, synthetic construct
  source 1..20: mol_type = other DNA
acactgttaaacaggaggaa

SEQ ID NO: 15132 - DNA, 20 bp, synthetic construct
  source 1..20: mol_type = other DNA
cacagcatccctatgagata

SEQ ID NO: 15133 - DNA, 20 bp, synthetic construct
  source 1..20: mol_type = other DNA
tcacttaggataggagaaga

SEQ ID NO: 15134 - DNA, 20 bp, synthetic construct
  source 1..20: mol_type = other DNA
gcttcctgggagaaaattgt

SEQ ID NO: 15135 - DNA, 20 bp, synthetic construct
  source 1..20: mol_type = other DNA
ggtgagctaaggccaagcta

SEQ ID NO: 15136 - DNA, 20 bp, synthetic construct
  source 1..20: mol_type = other DNA
gatgagtcccgaaagcagca

SEQ ID NO: 15137 - DNA, 20 bp, synthetic construct
  source 1..20: mol_type = other DNA
cccagcaggcatttttgtag

SEQ ID NO: 15138 - DNA, 20 bp, synthetic construct
  source 1..20: mol_type = other DNA
gcagagcacatttacggaga

SEQ ID NO: 15139 - DNA, 20 bp, synthetic construct
  source 1..20: mol_type = other DNA
ggtttcggttctccactgtg

SEQ ID NO: 15140 - DNA, 20 bp, synthetic construct
  source 1..20: mol_type = other DNA
ttgactcgaagcttcccgat

SEQ ID NO: 15141 - DNA, 20 bp, synthetic construct
  source 1..20: mol_type = other DNA
cacgatattttagctcgatg

SEQ ID NO: 15142 - DNA, 20 bp, synthetic construct
  source 1..20: mol_type = other DNA
ggcacctgacacagaagaag

SEQ ID NO: 15143 - DNA, 20 bp, synthetic construct
  source 1..20: mol_type = other DNA
cggtgtgattaagcctctgg

SEQ ID NO: 15144 - DNA, 20 bp, synthetic construct
  source 1..20: mol_type = other DNA
tgggcagttgctcattgttg

SEQ ID NO: 15145 - DNA, 20 bp, synthetic construct
  source 1..20: mol_type = other DNA
gcgccaccaggtgacgttgg

SEQ ID NO: 15146 - DNA, 20 bp, synthetic construct
  source 1..20: mol_type = other DNA
gaaattgaggtatggacact

SEQ ID NO: 15147 - DNA, 20 bp, synthetic construct
  source 1..20: mol_type = other DNA
accttcagatcttttcagcc

SEQ ID NO: 15148 - DNA, 20 bp, synthetic construct
  source 1..20: mol_type = other DNA
tttataagagttgcgaggcc

SEQ ID NO: 15149 - DNA, 20 bp, synthetic construct
  source 1..20: mol_type = other DNA
actcatccgtgtgtctgtgc

SEQ ID NO: 15150 - DNA, 20 bp, synthetic construct
  source 1..20: mol_type = other DNA
cctcaaaaggaaggatctca

SEQ ID NO: 15151 - DNA, 20 bp, synthetic construct
  source 1..20: mol_type = other DNA
gtctctgggctttagcctcc

SEQ ID NO: 15152 - DNA, 20 bp, synthetic construct
  source 1..20: mol_type = other DNA
ttgtcacataaatggctggg

SEQ ID NO: 15153 - DNA, 20 bp, synthetic construct
  source 1..20: mol_type = other DNA
aagttaacatcaacgctgct

SEQ ID NO: 15154 - DNA, 20 bp, synthetic construct
  source 1..20: mol_type = other DNA
acttgatttccactggaggt

SEQ ID NO: 15155 - DNA, 20 bp, synthetic construct
  source 1..20: mol_type = other DNA
acaacctttagcatcactgg

SEQ ID NO: 15156 - DNA, 20 bp, synthetic construct
  source 1..20: mol_type = other DNA
ttgtgtccctgtgcttttgg

SEQ ID NO: 15157 - DNA, 20 bp, synthetic construct
  source 1..20: mol_type = other DNA
gatgtcatcttgctgcacgt

SEQ ID NO: 15158 - DNA, 20 bp, synthetic construct
  source 1..20: mol_type = other DNA
gggactcatggaaaacatca

SEQ ID NO: 15159 - DNA, 20 bp, synthetic construct
  source 1..20: mol_type = other DNA
tggtctgtggcacggttctc

SEQ ID NO: 15160 - DNA, 20 bp, synthetic construct
  source 1..20: mol_type = other DNA
caatctgatgggatctagga

SEQ ID NO: 15161 - DNA, 20 bp, synthetic construct
  source 1..20: mol_type = other DNA
ccgcatctgcgcctggttgg

SEQ ID NO: 15162 - DNA, 20 bp, synthetic construct
  source 1..20: mol_type = other DNA
tggcgtctcggcccgagaac

SEQ ID NO: 15163 - DNA, 20 bp, synthetic construct
  source 1..20: mol_type = other DNA
gttggagattcatgagaacc

SEQ ID NO: 15164 - DNA, 20 bp, synthetic construct
  source 1..20: mol_type = other DNA
gctgggtcaggtaagcttca

SEQ ID NO: 15165 - DNA, 20 bp, synthetic construct
  source 1..20: mol_type = other DNA
tcaactccaggtttaaggcc

SEQ ID NO: 15166 - DNA, 20 bp, synthetic construct
  source 1..20: mol_type = other DNA
ggagcaaggttgatttcttt

SEQ ID NO: 15167 - DNA, 20 bp, synthetic construct
  source 1..20: mol_type = other DNA
agagaccctgttaaataggg

SEQ ID NO: 15168 - DNA, 20 bp, synthetic construct
  source 1..20: mol_type = other DNA
tccggctcccggcgtttctc

SEQ ID NO: 15169 - DNA, 20 bp, synthetic construct
  source 1..20: mol_type = other DNA
tgccaggtcgtagtactcag

SEQ ID NO: 15170 - DNA, 20 bp, synthetic construct
  source 1..20: mol_type = other DNA
gttctcttgggcttacttcc

SEQ ID NO: 15171 - DNA, 20 bp, synthetic construct
  source 1..20: mol_type = other DNA
tccagacaaatatgcacacg

SEQ ID NO: 15172 - DNA, 20 bp, synthetic construct
  source 1..20: mol_type = other DNA
tccctggttattgagtgagc

SEQ ID NO: 15173 - DNA, 20 bp, synthetic construct
  source 1..20: mol_type = other DNA
gagacttctgatcccagatc

SEQ ID NO: 15174 - DNA, 20 bp, synthetic construct
  source 1..20: mol_type = other DNA
gtctcatgcctgctgttaga

SEQ ID NO: 15175 - DNA, 20 bp, synthetic construct
  source 1..20: mol_type = other DNA
agcagaagttacacctagtt

SEQ ID NO: 15176 - DNA, 20 bp, synthetic construct
  source 1..20: mol_type = other DNA
atttgtatgaggcgggacaa

SEQ ID NO: 15177 - DNA, 20 bp, synthetic construct
  source 1..20: mol_type = other DNA
tgagcgaattccctctgcta

SEQ ID NO: 15178 - DNA, 20 bp, synthetic construct
  source 1..20: mol_type = other DNA
gttatgctttcacctcagca

SEQ ID NO: 15179 - DNA, 20 bp, synthetic construct
  source 1..20: mol_type = other DNA
cataaactcgcctgattggt

SEQ ID NO: 15180 - DNA, 20 bp, synthetic construct
  source 1..20: mol_type = other DNA
gagatagtggaacttgcgga

SEQ ID NO: 15181 - DNA, 20 bp, synthetic construct
  source 1..20: mol_type = other DNA
tcttcccagaacccttcata

SEQ ID NO: 15182 - DNA, 20 bp, synthetic construct
  source 1..20: mol_type = other DNA
gggatgctcttcgacctcga

SEQ ID NO: 15183 - DNA, 20 bp, synthetic construct
  source 1..20: mol_type = other DNA
tgcccacatcatcaaaggtc

SEQ ID NO: 15184 - DNA, 20 bp, synthetic construct
  source 1..20: mol_type = other DNA
acgctgctcgtatccgacgg

SEQ ID NO: 15185 - DNA, 20 bp, synthetic construct
  source 1..20: mol_type = other DNA
cccagtggacttgcagaaaa

SEQ ID NO: 15186 - DNA, 20 bp, synthetic construct
  source 1..20: mol_type = other DNA
tcctctttagaccacatccc

SEQ ID NO: 15187 - DNA, 20 bp, synthetic construct
  source 1..20: mol_type = other DNA
ttgggcttctttctaaatcg

SEQ ID NO: 15188 - DNA, 20 bp, synthetic construct
  source 1..20: mol_type = other DNA
caaactcactcatggctttg

SEQ ID NO: 15189 - DNA, 20 bp, synthetic construct
  source 1..20: mol_type = other DNA
attggtattccggttatgga

SEQ ID NO: 15190 - DNA, 20 bp, synthetic construct
  source 1..20: mol_type = other DNA
tgtctacagcattggctaat

SEQ ID NO: 15191 - DNA, 20 bp, synthetic construct
  source 1..20: mol_type = other DNA
ggacaggagatcctcttagc

SEQ ID NO: 15192 - DNA, 20 bp, synthetic construct
  source 1..20: mol_type = other DNA
gagaaaatgagtgacttccc

SEQ ID NO: 15193 - DNA, 20 bp, synthetic construct
  source 1..20: mol_type = other DNA
tgcattcacagttcaacatg

SEQ ID NO: 15194 - DNA, 20 bp, synthetic construct
  source 1..20: mol_type = other DNA
cagcttttttcaaggcatag

SEQ ID NO: 15195 - DNA, 20 bp, synthetic construct
  source 1..20: mol_type = other DNA
gcttgtctacctttccaagg

SEQ ID NO: 15196 - DNA, 20 bp, synthetic construct
  source 1..20: mol_type = other DNA
cgcgtcggcacccaagaatt

SEQ ID NO: 15197 - DNA, 20 bp, synthetic construct
  source 1..20: mol_type = other DNA
cagattggtgatgttgacat

SEQ ID NO: 15198 - DNA, 20 bp, synthetic construct
  source 1..20: mol_type = other DNA
attatctaggcacaccctgt

SEQ ID NO: 15199 - DNA, 20 bp, synthetic construct
  source 1..20: mol_type = other DNA
gccttgctcttagcatctcg

SEQ ID NO: 15200 - DNA, 20 bp, synthetic construct
  source 1..20: mol_type = other DNA
gtgcttttctcctttgatgt

SEQ ID NO: 15201 - DNA, 20 bp, synthetic construct
  source 1..20: mol_type = other DNA
gcccgcgaaatggaagccgt

SEQ ID NO: 15202 - DNA, 20 bp, synthetic construct
  source 1..20: mol_type = other DNA
gctgcagttcttcccaaagg

SEQ ID NO: 15203 - DNA, 20 bp, synthetic construct
  source 1..20: mol_type = other DNA
ctgtattcctaagagagcat

SEQ ID NO: 15204 - DNA, 20 bp, synthetic construct
  source 1..20: mol_type = other DNA
ccctaagaagatagcttgct

SEQ ID NO: 15205 - DNA, 20 bp, synthetic construct
  source 1..20: mol_type = other DNA
gctattttcttgcccttgta

SEQ ID NO: 15206 - DNA, 20 bp, synthetic construct
  source 1..20: mol_type = other DNA
ggtgtccagagagctccaca

SEQ ID NO: 15207 - DNA, 20 bp, synthetic construct
  source 1..20: mol_type = other DNA
ctgttctacttcaatcctct

SEQ ID NO: 15208 - DNA, 20 bp, synthetic construct
  source 1..20: mol_type = other DNA
agcctcgtttactgtcgcag

SEQ ID NO: 15209 - DNA, 20 bp, synthetic construct
  source 1..20: mol_type = other DNA
ttcattgcaatgtgctgtct

SEQ ID NO: 15210 - DNA, 20 bp, synthetic construct
  source 1..20: mol_type = other DNA
attcattctcaacgatgcca

SEQ ID NO: 15211 - DNA, 20 bp, synthetic construct
  source 1..20: mol_type = other DNA
tttgaaatttgggcacctca

SEQ ID NO: 15212 - DNA, 20 bp, synthetic construct
  source 1..20: mol_type = other DNA
gggaagccttcggcatcgca

SEQ ID NO: 15213 - DNA, 20 bp, synthetic construct
  source 1..20: mol_type = other DNA
cagctggtattcaacagccc

SEQ ID NO: 15214 - DNA, 20 bp, synthetic construct
  source 1..20: mol_type = other DNA
caggattctttctagctggg

SEQ ID NO: 15215 - DNA, 20 bp, synthetic construct
  source 1..20: mol_type = other DNA
cacacctctgcttttggaaa

SEQ ID NO: 15216 - DNA, 20 bp, synthetic construct
  source 1..20: mol_type = other DNA
ctgttggtggcatacttgaa

SEQ ID NO: 15217 - DNA, 20 bp, synthetic construct
  source 1..20: mol_type = other DNA
gttacagaagaccagtaagg

SEQ ID NO: 15218 - DNA, 20 bp, synthetic construct
  source 1..20: mol_type = other DNA
agccgcactgaccagatggg

SEQ ID NO: 15219 - DNA, 20 bp, synthetic construct
  source 1..20: mol_type = other DNA
gatgaagtgggtgccgtagt

SEQ ID NO: 15220 - DNA, 20 bp, synthetic construct
  source 1..20: mol_type = other DNA
tcgaaggaagggaatgttat

SEQ ID NO: 15221 - DNA, 20 bp, synthetic construct
  source 1..20: mol_type = other DNA
caggatgctcctgtttaagc

SEQ ID NO: 15222 - DNA, 20 bp, synthetic construct
  source 1..20: mol_type = other DNA
aacccagagaatgcagtaac

SEQ ID NO: 15223 - DNA, 20 bp, synthetic construct
  source 1..20: mol_type = other DNA
agggtcatgttcgtaggtgt

SEQ ID NO: 15224 - DNA, 20 bp, synthetic construct
  source 1..20: mol_type = other DNA
aggtgaaagttattcctccg

SEQ ID NO: 15225 - DNA, 20 bp, synthetic construct
  source 1..20: mol_type = other DNA
cattaggtaactgactgaca

SEQ ID NO: 15226 - DNA, 20 bp, synthetic construct
  source 1..20: mol_type = other DNA
accacagaaataagctcaga

SEQ ID NO: 15227 - DNA, 20 bp, synthetic construct
  source 1..20: mol_type = other DNA
aactgggtttcttggaaagt

SEQ ID NO: 15228 - DNA, 20 bp, synthetic construct
  source 1..20: mol_type = other DNA
acccactagatgcaaaaagc

SEQ ID NO: 15229 - DNA, 20 bp, synthetic construct
  source 1..20: mol_type = other DNA
ggtcctgctcaggtgaatcg

SEQ ID NO: 15230 - DNA, 20 bp, synthetic construct
  source 1..20: mol_type = other DNA
caacctctatcccttttcca

SEQ ID NO: 15231 - DNA, 20 bp, synthetic construct
  source 1..20: mol_type = other DNA
acggaaataacctagatggg

SEQ ID NO: 15232 - DNA, 20 bp, synthetic construct
  source 1..20: mol_type = other DNA
ttgtaagatgatagagccac

SEQ ID NO: 15233 - DNA, 20 bp, synthetic construct
  source 1..20: mol_type = other DNA
gtgtattgatgcagaaaagg

SEQ ID NO: 15234 - DNA, 20 bp, synthetic construct
  source 1..20: mol_type = other DNA
actagacaaagactggtctt

SEQ ID NO: 15235 - DNA, 20 bp, synthetic construct
  source 1..20: mol_type = other DNA
actttatcgcagctctcaga

SEQ ID NO: 15236 - DNA, 20 bp, synthetic construct
  source 1..20: mol_type = other DNA
agacttcgagactggacaag

SEQ ID NO: 15237 - DNA, 20 bp, synthetic construct
  source 1..20: mol_type = other DNA
agtcttcacaggtgcattct

SEQ ID NO: 15238 - DNA, 20 bp, synthetic construct
  source 1..20: mol_type = other DNA
tggagggagatgtcctaccg

SEQ ID NO: 15239 - DNA, 20 bp, synthetic construct
  source 1..20: mol_type = other DNA
cccacctagcattgaaactg

SEQ ID NO: 15240 - DNA, 20 bp, synthetic construct
  source 1..20: mol_type = other DNA
aactttatttctcgccactg

SEQ ID NO: 15241 - DNA, 20 bp, synthetic construct
  source 1..20: mol_type = other DNA
tgagagttgcatttccagaa

SEQ ID NO: 15242 - DNA, 20 bp, synthetic construct
  source 1..20: mol_type = other DNA
cctcaatgacaggagtaaag

SEQ ID NO: 15243 - DNA, 20 bp, synthetic construct
  source 1..20: mol_type = other DNA
gagtctgtgtttttgcagga

SEQ ID NO: 15244 - DNA, 20 bp, synthetic construct
  source 1..20: mol_type = other DNA
agccggtgtcctcatccctg

SEQ ID NO: 15245 - DNA, 20 bp, synthetic construct
  source 1..20: mol_type = other DNA
agaggctgctggtctcatag

SEQ ID NO: 15246 - DNA, 20 bp, synthetic construct
  source 1..20: mol_type = other DNA
gacaagaaactcatggcttt

SEQ ID NO: 15247 - DNA, 20 bp, synthetic construct
  source 1..20: mol_type = other DNA
attggtccacgtgtagtctc

SEQ ID NO: 15248 - DNA, 20 bp, synthetic construct
  source 1..20: mol_type = other DNA
ctctgcaagagcaactttgt

SEQ ID NO: 15249 - DNA, 20 bp, synthetic construct
  source 1..20: mol_type = other DNA
agggtcctttctccatttaa

SEQ ID NO: 15250 - DNA, 20 bp, synthetic construct
  source 1..20: mol_type = other DNA
taccatggttttcccatctt

SEQ ID NO: 15251 - DNA, 20 bp, synthetic construct
  source 1..20: mol_type = other DNA
ggctgttgtccgtcttattg

SEQ ID NO: 15252 - DNA, 20 bp, synthetic construct
  source 1..20: mol_type = other DNA
acatcagggctcggttccgg

SEQ ID NO: 15253 - DNA, 20 bp, synthetic construct
  source 1..20: mol_type = other DNA
acgctggtcacggtcagtgc

SEQ ID NO: 15254 - DNA, 20 bp, synthetic construct
  source 1..20: mol_type = other DNA
gcctgggaagtatgtacacg

SEQ ID NO: 15255 - DNA, 20 bp, synthetic construct
  source 1..20: mol_type = other DNA
cgtcggagtccagcacggga

SEQ ID NO: 15256 - DNA, 20 bp, synthetic construct
  source 1..20: mol_type = other DNA
tagtctcagttggcagtgtt

SEQ ID NO: 15257 - DNA, 20 bp, synthetic construct
  source 1..20: mol_type = other DNA
gcctttaggatctctcttct

SEQ ID NO: 15258 - DNA, 20 bp, synthetic construct
  source 1..20: mol_type = other DNA
ccacgctctcctggtagatc

SEQ ID NO: 15259 - DNA, 20 bp, synthetic construct
  source 1..20: mol_type = other DNA
gcagagggttggcgcttaca

SEQ ID NO: 15260 - DNA, 20 bp, synthetic construct
  source 1..20: mol_type = other DNA
cttggaagaagtgcagatag

SEQ ID NO: 15261 - DNA, 20 bp, synthetic construct
  source 1..20: mol_type = other DNA
gcagtccaggagagttgggt

SEQ ID NO: 15262 - DNA, 20 bp, synthetic construct
  source 1..20: mol_type = other DNA
gatacaaacttggcctatca

SEQ ID NO: 15263 - DNA, 20 bp, synthetic construct
  source 1..20: mol_type = other DNA
tagcacctcagtagagctta

SEQ ID NO: 15264 - DNA, 20 bp, synthetic construct
  source 1..20: mol_type = other DNA
tagaagttagtctgcctgat

SEQ ID NO: 15265 - DNA, 20 bp, synthetic construct
  source 1..20: mol_type = other DNA
tcccaggcagctttttgagt

SEQ ID NO: 15266 - DNA, 20 bp, synthetic construct
  source 1..20: mol_type = other DNA
gaaaggagttgactcagata

SEQ ID NO: 15267 - DNA, 20 bp, synthetic construct
  source 1..20: mol_type = other DNA
cacgagtcactctcgttttc

SEQ ID NO: 15268 - DNA, 20 bp, synthetic construct
  source 1..20: mol_type = other DNA
tgttctcaaactcacaccct

SEQ ID NO: 15269 - DNA, 20 bp, synthetic construct
  source 1..20: mol_type = other DNA
cattttcttcacggaaacag

SEQ ID NO: 15270 - DNA, 20 bp, synthetic construct
  source 1..20: mol_type = other DNA
tctgagtttcctcgggtcta

SEQ ID NO: 15271 - DNA, 20 bp, synthetic construct
  source 1..20: mol_type = other DNA
gaattgttctggaggaacaa

SEQ ID NO: 15272 - DNA, 20 bp, synthetic construct
  source 1..20: mol_type = other DNA
aaaatgcaaagccaccaaag

SEQ ID NO: 15273 - DNA, 20 bp, synthetic construct
  source 1..20: mol_type = other DNA
acaggctcggacgcacgagc

SEQ ID NO: 15274 - DNA, 20 bp, synthetic construct
  source 1..20: mol_type = other DNA
gtccaatagtcgataacacc

SEQ ID NO: 15275 - DNA, 20 bp, synthetic construct
  source 1..20: mol_type = other DNA
ccggagaccctaaccgtacc

SEQ ID NO: 15276 - DNA, 20 bp, synthetic construct
  source 1..20: mol_type = other DNA
ctcgaaaaatagaccctact

SEQ ID NO: 15277 - DNA, 20 bp, synthetic construct
  source 1..20: mol_type = other DNA
ctaatattctggaggtcagc

SEQ ID NO: 15278 - DNA, 20 bp, synthetic construct
  source 1..20: mol_type = other DNA
gccaggctttgaatcgcctc

SEQ ID NO: 15279 - DNA, 20 bp, synthetic construct
  source 1..20: mol_type = other DNA
caaaggacacacgccttctt

SEQ ID NO: 15280 - DNA, 20 bp, synthetic construct
  source 1..20: mol_type = other DNA
gttgagtataatccgtaggg

SEQ ID NO: 15281 - DNA, 20 bp, synthetic construct
  source 1..20: mol_type = other DNA
cccttcaagatacctataga

SEQ ID NO: 15282 - DNA, 20 bp, synthetic construct
  source 1..20: mol_type = other DNA
tggccgtggctaccatctca

SEQ ID NO: 15283 - DNA, 20 bp, synthetic construct
  source 1..20: mol_type = other DNA
gagaccgtcctggcgcgatg

SEQ ID NO: 15284 - DNA, 20 bp, synthetic construct
  source 1..20: mol_type = other DNA
gtatgtctcgtggtaggact

SEQ ID NO: 15285 - DNA, 20 bp, synthetic construct
  source 1..20: mol_type = other DNA
ctcctgatgtgcatatccgt

SEQ ID NO: 15286 - DNA, 20 bp, synthetic construct
  source 1..20: mol_type = other DNA
ggaacatggaagtcaacgtt

SEQ ID NO: 15287 - DNA, 20 bp, synthetic construct
  source 1..20: mol_type = other DNA
tgcgtgtgctagcgtactcc

SEQ ID NO: 15288 - DNA, 20 bp, synthetic construct
  source 1..20: mol_type = other DNA
gacgtatcaatgaatatgcc

SEQ ID NO: 15289 - DNA, 20 bp, synthetic construct
  source 1..20: mol_type = other DNA
cacagctcaagacgctggaa

SEQ ID NO: 15290 - DNA, 20 bp, synthetic construct
  source 1..20: mol_type = other DNA
ggtgactgttcttgacactg

SEQ ID NO: 15291 - DNA, 20 bp, synthetic construct
  source 1..20: mol_type = other DNA
tctcaggctcaccagatgag

SEQ ID NO: 15292 - DNA, 20 bp, synthetic construct
  source 1..20: mol_type = other DNA
ttttctccatcaacaaccag

SEQ ID NO: 15293 - DNA, 20 bp, synthetic construct
  source 1..20: mol_type = other DNA
ggaatacagagcggaggtcg

SEQ ID NO: 15294 - DNA, 20 bp, synthetic construct
  source 1..20: mol_type = other DNA
gtggtaggaatgttccaccc

SEQ ID NO: 15295 - DNA, 20 bp, synthetic construct
  source 1..20: mol_type = other DNA
ccatcatcaacaccttccac

SEQ ID NO: 15296 - DNA, 20 bp, synthetic construct
  source 1..20: mol_type = other DNA
aggcctcacacacaatgtgt

SEQ ID NO: 15297 - DNA, 20 bp, synthetic construct
  source 1..20: mol_type = other DNA
cagatcttccgagacaggac

SEQ ID NO: 15298 - DNA, 20 bp, synthetic construct
  source 1..20: mol_type = other DNA
ctccaagcccagattcagat

SEQ ID NO: 15299 - DNA, 20 bp, synthetic construct
  source 1..20: mol_type = other DNA
ggtctgcaatctcacctacc

SEQ ID NO: 15300 - DNA, 20 bp, synthetic construct
  source 1..20: mol_type = other DNA
acatctcaaacaagagtcct

SEQ ID NO: 15301 - DNA, 20 bp, synthetic construct
  source 1..20: mol_type = other DNA
cggagtgcgcgacgattcta

SEQ ID NO: 15302 - DNA, 20 bp, synthetic construct
  source 1..20: mol_type = other DNA
gaaaaataggctggattgga

SEQ ID NO: 15303 - DNA, 20 bp, synthetic construct
  source 1..20: mol_type = other DNA
ggctgatgatacggccgagc

SEQ ID NO: 15304 - DNA, 20 bp, synthetic construct
  source 1..20: mol_type = other DNA
cctcaagtaaaccgtttcat

SEQ ID NO: 15305 - DNA, 20 bp, synthetic construct
  source 1..20: mol_type = other DNA
atgcacttgagatcttcact

SEQ ID NO: 15306 - DNA, 20 bp, synthetic construct
  source 1..20: mol_type = other DNA
gtgtttgcccagttattgct

SEQ ID NO: 15307 - DNA, 20 bp, synthetic construct
  source 1..20: mol_type = other DNA
gctctcattcgtggtcagat

SEQ ID NO: 15308 - DNA, 20 bp, synthetic construct
  source 1..20: mol_type = other DNA
atgagggttgtcaatgagct

SEQ ID NO: 15309 - DNA, 20 bp, synthetic construct
  source 1..20: mol_type = other DNA
gggtgagtgcgatcttttcc

SEQ ID NO: 15310 - DNA, 20 bp, synthetic construct
  source 1..20: mol_type = other DNA
caaggactgcaaatcctagg

SEQ ID NO: 15311 - DNA, 20 bp, synthetic construct
  source 1..20: mol_type = other DNA
aaagtgaagggacatatgag

SEQ ID NO: 15312 - DNA, 20 bp, synthetic construct
  source 1..20: mol_type = other DNA
ctctcaccaaataactgcat

SEQ ID NO: 15313 - DNA, 20 bp, synthetic construct
  source 1..20: mol_type = other DNA
tgctggcaaatgggatctag

SEQ ID NO: 15314 - DNA, 20 bp, synthetic construct
  source 1..20: mol_type = other DNA
gcctacaagtcagtggtgtg

SEQ ID NO: 15315 - DNA, 20 bp, synthetic construct
  source 1..20: mol_type = other DNA
tcccaggtcaatagagttat

SEQ ID NO: 15316 - DNA, 20 bp, synthetic construct
  source 1..20: mol_type = other DNA
gtgattctcatgcatagtgt

SEQ ID NO: 15317 - DNA, 20 bp, synthetic construct
  source 1..20: mol_type = other DNA
gtgggtgtaaccacagactc

SEQ ID NO: 15318 - DNA, 20 bp, synthetic construct
  source 1..20: mol_type = other DNA
ataaggcaatggcttacact

SEQ ID NO: 15319 - DNA, 20 bp, synthetic construct
  source 1..20: mol_type = other DNA
tatcagaggtacactttcca

SEQ ID NO: 15320 - DNA, 20 bp, synthetic construct
  source 1..20: mol_type = other DNA
gtcccttgccaaaattaact

SEQ ID NO: 15321 - DNA, 20 bp, synthetic construct
  source 1..20: mol_type = other DNA
catgcctccaaaaggcgggt

SEQ ID NO: 15322 - DNA, 20 bp, synthetic construct
  source 1..20: mol_type = other DNA
taccatagaaaccgggttaa

SEQ ID NO: 15323 - DNA, 20 bp, synthetic construct
  source 1..20: mol_type = other DNA
cactccagcactatagttgt

SEQ ID NO: 15324 - DNA, 20 bp, synthetic construct
  source 1..20: mol_type = other DNA
actgacttgtgaggtcactt

SEQ ID NO: 15325 - DNA, 20 bp, synthetic construct
  source 1..20: mol_type = other DNA
tggtttgggctgtctttatt

SEQ ID NO: 15326 - DNA, 20 bp, synthetic construct
  source 1..20: mol_type = other DNA
aaggacgcctgagaaatacg

SEQ ID NO: 15327 - DNA, 20 bp, synthetic construct
  source 1..20: mol_type = other DNA
tttggagaggagattactgt

SEQ ID NO: 15328 - DNA, 20 bp, synthetic construct
  source 1..20: mol_type = other DNA
aaagctctaggtggctgata

SEQ ID NO: 15329 - DNA, 20 bp, synthetic construct
  source 1..20: mol_type = other DNA
tccaaacttgtgccttgtta

SEQ ID NO: 15330 - DNA, 20 bp, synthetic construct
  source 1..20: mol_type = other DNA
cctacaccctggtgtaacct

SEQ ID NO: 15331 - DNA, 20 bp, synthetic construct
  source 1..20: mol_type = other DNA
ctgctcactgtgcatataaa

SEQ ID NO: 15332 - DNA, 20 bp, synthetic construct
  source 1..20: mol_type = other DNA
acaccaagcaagttccacct

SEQ ID NO: 15333 - DNA, 20 bp, synthetic construct
  source 1..20: mol_type = other DNA
agcatggtagtgatcaccaa

SEQ ID NO: 15334 - DNA, 20 bp, synthetic construct
  source 1..20: mol_type = other DNA
aatcctgaatcttgagctga

SEQ ID NO: 15335 - DNA, 20 bp, synthetic construct
  source 1..20: mol_type = other DNA
gggtgatgttattagggtga

SEQ ID NO: 15336 - DNA, 20 bp, synthetic construct
  source 1..20: mol_type = other DNA
aagaaatggagtaagtcacc

SEQ ID NO: 15337 - DNA, 20 bp, synthetic construct
  source 1..20: mol_type = other DNA
tgaggcatagcagtctctcc

SEQ ID NO: 15338 - DNA, 20 bp, synthetic construct
  source 1..20: mol_type = other DNA
gcaagattgaagaggagact

SEQ ID NO: 15339 - DNA, 20 bp, synthetic construct
  source 1..20: mol_type = other DNA
agtccaatacgctagggcag

SEQ ID NO: 15340 - DNA, 20 bp, synthetic construct
  source 1..20: mol_type = other DNA
aattactctgaacctgacgg

SEQ ID NO: 15341 - DNA, 20 bp, synthetic construct
  source 1..20: mol_type = other DNA
ccacgggagccaatgaggaa

SEQ ID NO: 15342 - DNA, 20 bp, synthetic construct
  source 1..20: mol_type = other DNA
gaaaactggtttagcgccac

SEQ ID NO: 15343 - DNA, 20 bp, synthetic construct
  source 1..20: mol_type = other DNA
ataccgctccacctaaagct

SEQ ID NO: 15344 - DNA, 20 bp, synthetic construct
  source 1..20: mol_type = other DNA
caaagcatacatgggctaat

SEQ ID NO: 15345 - DNA, 20 bp, synthetic construct
  source 1..20: mol_type = other DNA
cctcccattaggcttgcttg

SEQ ID NO: 15346 - DNA, 20 bp, synthetic construct
  source 1..20: mol_type = other DNA
catccacatggcaggtgaat

SEQ ID NO: 15347 - DNA, 20 bp, synthetic construct
  source 1..20: mol_type = other DNA
gagaggtcagagtactgtaa

SEQ ID NO: 15348 - DNA, 20 bp, synthetic construct
  source 1..20: mol_type = other DNA
tgtttcttgagtggatggtt

SEQ ID NO: 15349 - DNA, 20 bp, synthetic construct
  source 1..20: mol_type = other DNA
agctcacctggtgggccgga

SEQ ID NO: 15350 - DNA, 20 bp, synthetic construct
  source 1..20: mol_type = other DNA
catcaccaaggtatttagtc

SEQ ID NO: 15351 - DNA, 20 bp, synthetic construct
  source 1..20: mol_type = other DNA
ctggttgaacctattctcaa

SEQ ID NO: 15352 - DNA, 20 bp, synthetic construct
  source 1..20: mol_type = other DNA
gtctgtgttcttgaccctat

SEQ ID NO: 15353 - DNA, 20 bp, synthetic construct
  source 1..20: mol_type = other DNA
tagttgctttgctgagattc

SEQ ID NO: 15354 - DNA, 20 bp, synthetic construct
  source 1..20: mol_type = other DNA
accacttttgtaaccatcac

SEQ ID NO: 15355 - DNA, 20 bp, synthetic construct
  source 1..20: mol_type = other DNA
gttgctgcagataattggtt

SEQ ID NO: 15356 - DNA, 20 bp, synthetic construct
  source 1..20: mol_type = other DNA
aagtttattgagagcctcct

SEQ ID NO: 15357 - DNA, 20 bp, synthetic construct
  source 1..20: mol_type = other DNA
gtagctcaacttgggcttag

SEQ ID NO: 15358 - DNA, 20 bp, synthetic construct
  source 1..20: mol_type = other DNA
tagagacaactggcaatagt

SEQ ID NO: 15359 - DNA, 20 bp, synthetic construct
  source 1..20: mol_type = other DNA
tgctccacaccaaatgccat

SEQ ID NO: 15360 - DNA, 20 bp, synthetic construct
  source 1..20: mol_type = other DNA
gccacgcgtctgatcccaaa

SEQ ID NO: 15361 - DNA, 20 bp, synthetic construct
  source 1..20: mol_type = other DNA
gataatgaagaccttagccc

SEQ ID NO: 15362 - DNA, 20 bp, synthetic construct
  source 1..20: mol_type = other DNA
aaccacaaacacgtcataca

SEQ ID NO: 15363 - DNA, 20 bp, synthetic construct
  source 1..20: mol_type = other DNA
ctaaaaaggaccacaggttt

SEQ ID NO: 15364 - DNA, 20 bp, synthetic construct
  source 1..20: mol_type = other DNA
caggacgtggatatgaagcc

SEQ ID NO: 15365 - DNA, 20 bp, synthetic construct
  source 1..20: mol_type = other DNA
ttaaggtggcagaagtgaat

SEQ ID NO: 15366 - DNA, 20 bp, synthetic construct
  source 1..20: mol_type = other DNA
ggagaggttgaaatatacac

SEQ ID NO: 15367 - DNA, 20 bp, synthetic construct
  source 1..20: mol_type = other DNA
atgctcatagctacttggac

SEQ ID NO: 15368 - DNA, 20 bp, synthetic construct
  source 1..20: mol_type = other DNA
tgtgatgtgagtgtgagatt

SEQ ID NO: 15369 - DNA, 20 bp, synthetic construct
  source 1..20: mol_type = other DNA
gtgcctaagaggtattcaag

SEQ ID NO: 15370 - DNA, 20 bp, synthetic construct
  source 1..20: mol_type = other DNA
gagccacagcctctggcaag

SEQ ID NO: 15371 - DNA, 20 bp, synthetic construct
  source 1..20: mol_type = other DNA
tgtgtgtggagcattaccta

SEQ ID NO: 15372 - DNA, 20 bp, synthetic construct
  source 1..20: mol_type = other DNA
gccacacttgtattcatggc

SEQ ID NO: 15373 - DNA, 20 bp, synthetic construct
  source 1..20: mol_type = other DNA
ggtttcttcctgaccggatc

SEQ ID NO: 15374 - DNA, 20 bp, synthetic construct
  source 1..20: mol_type = other DNA
gttacacgtgctcaatacat

SEQ ID NO: 15375 - DNA, 20 bp, synthetic construct
  source 1..20: mol_type = other DNA
atatctgatgtactctggtg

SEQ ID NO: 15376 - DNA, 20 bp, synthetic construct
  source 1..20: mol_type = other DNA
caagattagccaggagttgg

SEQ ID NO: 15377 - DNA, 20 bp, synthetic construct
  source 1..20: mol_type = other DNA
aattgctgggacaaagcctt

SEQ ID NO: 15378 - DNA, 20 bp, synthetic construct
  source 1..20: mol_type = other DNA
ttcccattgatccacttatg

SEQ ID NO: 15379 - DNA, 20 bp, synthetic construct
  source 1..20: mol_type = other DNA
aagcattaggacaatcggta

SEQ ID NO: 15380 - DNA, 20 bp, synthetic construct
  source 1..20: mol_type = other DNA
cgtgaactctgaccttagct

SEQ ID NO: 15381 - DNA, 20 bp, synthetic construct
  source 1..20: mol_type = other DNA
accttgtcaccttaaccttt

SEQ ID NO: 15382 - DNA, 20 bp, synthetic construct
  source 1..20: mol_type = other DNA
attacttacccgagtccttc

SEQ ID NO: 15383 - DNA, 20 bp, synthetic construct
  source 1..20: mol_type = other DNA
atttttgtctctggtgcacg

SEQ ID NO: 15384 - DNA, 20 bp, synthetic construct
  source 1..20: mol_type = other DNA
tgagatgtgtcctttactgc

SEQ ID NO: 15385 - DNA, 20 bp, synthetic construct
  source 1..20: mol_type = other DNA
cgcaaaggctgtatattaca

SEQ ID NO: 15386 - DNA, 20 bp, synthetic construct
  source 1..20: mol_type = other DNA
cttcagagttgacagatacc

SEQ ID NO: 15387 - DNA, 20 bp, synthetic construct
  source 1..20: mol_type = other DNA
attccaggtggttctctttt

SEQ ID NO: 15388 - DNA, 20 bp, synthetic construct
  source 1..20: mol_type = other DNA
catgctgctcctttgggtga

SEQ ID NO: 15389 - DNA, 20 bp, synthetic construct
  source 1..20: mol_type = other DNA
tattcctttcaagcccaagg

SEQ ID NO: 15390 - DNA, 20 bp, synthetic construct
  source 1..20: mol_type = other DNA
tcaccctcttctcccagaac

SEQ ID NO: 15391 - DNA, 20 bp, synthetic construct
  source 1..20: mol_type = other DNA
ggaaaacctttgtcaaccaa

SEQ ID NO: 15392 - DNA, 20 bp, synthetic construct
  source 1..20: mol_type = other DNA
gctagaatgaccctctaaag

SEQ ID NO: 15393 - DNA, 20 bp, synthetic construct
  source 1..20: mol_type = other DNA
tcctacacctcaggaaatag

SEQ ID NO: 15394 - DNA, 20 bp, synthetic construct
  source 1..20: mol_type = other DNA
ttatgaagacactaatcccg

SEQ ID NO: 15395 - DNA, 20 bp, synthetic construct
  source 1..20: mol_type = other DNA
tcattgatgggtccctaata

SEQ ID NO: 15396 - DNA, 20 bp, synthetic construct
  source 1..20: mol_type = other DNA
gagcttcagagcaacataat

SEQ ID NO: 15397 - DNA, 20 bp, synthetic construct
  source 1..20: mol_type = other DNA
gtgacacaaacacataatgg

SEQ ID NO: 15398 - DNA, 20 bp, synthetic construct
  source 1..20: mol_type = other DNA
gctcaatattatggcctcat

SEQ ID NO: 15399 - DNA, 20 bp, synthetic construct
  source 1..20: mol_type = other DNA
tccgctcaggactgcatcac

SEQ ID NO: 15400 - DNA, 20 bp, synthetic construct
  source 1..20: mol_type = other DNA
tttgtggtttttacgtggca

SEQ ID NO: 15401 - DNA, 20 bp, synthetic construct
  source 1..20: mol_type = other DNA
aatagagacttgcacccgaa

SEQ ID NO: 15402 - DNA, 20 bp, synthetic construct
  source 1..20: mol_type = other DNA
tcacttattgcttatgcctg

SEQ ID NO: 15403 - DNA, 20 bp, synthetic construct
  source 1..20: mol_type = other DNA
ggagaggtaccaattctgga

SEQ ID NO: 15404 - DNA, 20 bp, synthetic construct
  source 1..20: mol_type = other DNA
taacagcattgctggcaccc

SEQ ID NO: 15405 - DNA, 20 bp, synthetic construct
  source 1..20: mol_type = other DNA
atggccgtaagtgcggtggc

SEQ ID NO: 15406 - DNA, 20 bp, synthetic construct
  source 1..20: mol_type = other DNA
cacaggtagacttcactccc

SEQ ID NO: 15407 - DNA, 20 bp, synthetic construct
  source 1..20: mol_type = other DNA
tactgcaggtaccagtatga

SEQ ID NO: 15408 - DNA, 20 bp, synthetic construct
  source 1..20: mol_type = other DNA
cctgtcaacccttcctcatg

SEQ ID NO: 15409 - DNA, 20 bp, synthetic construct
  source 1..20: mol_type = other DNA
tcgtggacaaaatccaggag

SEQ ID NO: 15410 - DNA, 20 bp, synthetic construct
  source 1..20: mol_type = other DNA
ggatccacattgacatatgt

SEQ ID NO: 15411 - DNA, 20 bp, synthetic construct
  source 1..20: mol_type = other DNA
cagactcttaaaaagtggcc

SEQ ID NO: 15412 - DNA, 20 bp, synthetic construct
  source 1..20: mol_type = other DNA
ctgaaccaccatgatcatta

SEQ ID NO: 15413 - DNA, 20 bp, synthetic construct
  source 1..20: mol_type = other DNA
gcccaatccctgaaaagttc

SEQ ID NO: 15414 - DNA, 20 bp, synthetic construct
  source 1..20: mol_type = other DNA
gagctgtccaggattaactg

SEQ ID NO: 15415 - DNA, 20 bp, synthetic construct
  source 1..20: mol_type = other DNA
aaatgaggttaggattaggc

SEQ ID NO: 15416 - DNA, 20 bp, synthetic construct
  source 1..20: mol_type = other DNA
gtcatatgattggctcatac

SEQ ID NO: 15417 - DNA, 20 bp, synthetic construct
  source 1..20: mol_type = other DNA
aagggacaaatcataacgct

SEQ ID NO: 15418 - DNA, 20 bp, synthetic construct
  source 1..20: mol_type = other DNA
ttgtagaaaacctctcgtct

SEQ ID NO: 15419 - DNA, 20 bp, synthetic construct
  source 1..20: mol_type = other DNA
gtgtttagagcaagacctag

SEQ ID NO: 15420 - DNA, 20 bp, synthetic construct
  source 1..20: mol_type = other DNA
aaacaacgagtaccttgtgc

SEQ ID NO: 15421 - DNA, 20 bp, synthetic construct
  source 1..20: mol_type = other DNA
acggatgcgtgagcaaaggt

SEQ ID NO: 15422 - DNA, 20 bp, synthetic construct
  source 1..20: mol_type = other DNA
atacagttctcctatcaagg

SEQ ID NO: 15423 - DNA, 20 bp, synthetic construct
  source 1..20: mol_type = other DNA
cagcgagcaggtgtacgccc

SEQ ID NO: 15424 - DNA, 20 bp, synthetic construct
  source 1..20: mol_type = other DNA
cgatcttgccacgattgcct

SEQ ID NO: 15425 - DNA, 20 bp, synthetic construct
  source 1..20: mol_type = other DNA
gaaggttcgaaaccagtaaa

SEQ ID NO: 15426 - DNA, 20 bp, synthetic construct
  source 1..20: mol_type = other DNA
gcgagcgtcgcagattaact

SEQ ID NO: 15427 - DNA, 20 bp, synthetic construct
  source 1..20: mol_type = other DNA
ggttgcgatctatattcgga

SEQ ID NO: 15428 - DNA, 20 bp, synthetic construct
  source 1..20: mol_type = other DNA
tcaacgcaggtcgctcacga

SEQ ID NO: 15429 - DNA, 20 bp, synthetic construct
  source 1..20: mol_type = other DNA
tgcgaggtggaaaagtcaca

SEQ ID NO: 15430 - DNA, 20 bp, synthetic construct
  source 1..20: mol_type = other DNA
aaccagtaaaaagacgcgat

SEQ ID NO: 15431 - DNA, 20 bp, synthetic construct
  source 1..20: mol_type = other DNA
actagtcggaggtctaattt

SEQ ID NO: 15432 - DNA, 20 bp, synthetic construct
  source 1..20: mol_type = other DNA
ataggagcgaccgattacgt

SEQ ID NO: 15433 - DNA, 20 bp, synthetic construct
  source 1..20: mol_type = other DNA
caggtcgcagataaatgtgg

SEQ ID NO: 15434 - DNA, 20 bp, synthetic construct
  source 1..20: mol_type = other DNA
cgctggtgccacacgactac

SEQ ID NO: 15435 - DNA, 20 bp, synthetic construct
  source 1..20: mol_type = other DNA
gacagtattgtgcttgacgt

SEQ ID NO: 15436 - DNA, 20 bp, synthetic construct
  source 1..20: mol_type = other DNA
gctaactcttttcataaccc

SEQ ID NO: 15437 - DNA, 20 bp, synthetic construct
  source 1..20: mol_type = other DNA
gtattcgttttgagcgctga

SEQ ID NO: 15438 - DNA, 20 bp, synthetic construct
  source 1..20: mol_type = other DNA
tcagaaggttcgaaaccagt

SEQ ID NO: 15439 - DNA, 20 bp, synthetic construct
  source 1..20: mol_type = other DNA
tggacgcgcatgattgagtt

SEQ ID NO: 15440 - DNA, 20 bp, synthetic construct
  source 1..20: mol_type = other DNA
aaacaacgagtaccttgtgc

SEQ ID NO: 15441 - DNA, 20 bp, synthetic construct
  source 1..20: mol_type = other DNA
acggatgcgtgagcaaaggt

SEQ ID NO: 15442 - DNA, 20 bp, synthetic construct
  source 1..20: mol_type = other DNA
atacagttctcctatcaagg

SEQ ID NO: 15443 - DNA, 20 bp, synthetic construct
  source 1..20: mol_type = other DNA
cagcgagcaggtgtacgccc

SEQ ID NO: 15444 - DNA, 20 bp, synthetic construct
  source 1..20: mol_type = other DNA
cgatcttgccacgattgcct

SEQ ID NO: 15445 - DNA, 20 bp, synthetic construct
  source 1..20: mol_type = other DNA
gaaggttcgaaaccagtaaa

SEQ ID NO: 15446 - DNA, 20 bp, synthetic construct
  source 1..20: mol_type = other DNA
gcgagcgtcgcagattaact

SEQ ID NO: 15447 - DNA, 20 bp, synthetic construct
  source 1..20: mol_type = other DNA
ggttgcgatctatattcgga

SEQ ID NO: 15448 - DNA, 20 bp, synthetic construct
  source 1..20: mol_type = other DNA
tcaacgcaggtcgctcacga

SEQ ID NO: 15449 - DNA, 20 bp, synthetic construct
  source 1..20: mol_type = other DNA
tgcgaggtggaaaagtcaca

SEQ ID NO: 15450 - DNA, 20 bp, synthetic construct
  source 1..20: mol_type = other DNA
aagaactcgtaagtaagccg

SEQ ID NO: 15451 - DNA, 20 bp, synthetic construct
  source 1..20: mol_type = other DNA
actgctagggactggtaaaa

SEQ ID NO: 15452 - DNA, 20 bp, synthetic construct
  source 1..20: mol_type = other DNA
atcactgaattgcgggaatc

SEQ ID NO: 15453 - DNA, 20 bp, synthetic construct
  source 1..20: mol_type = other DNA
cattcctattgttttcccga

SEQ ID NO: 15454 - DNA, 20 bp, synthetic construct
  source 1..20: mol_type = other DNA
cgggtgaccaatgaccatat

SEQ ID NO: 15455 - DNA, 20 bp, synthetic construct
  source 1..20: mol_type = other DNA
gacgcgactgctagggactg

SEQ ID NO: 15456 - DNA, 20 bp, synthetic construct
  source 1..20: mol_type = other DNA
gctcttcgacgttatagata

SEQ ID NO: 15457 - DNA, 20 bp, synthetic construct
  source 1..20: mol_type = other DNA
gtccgggttattatcgtcgc

SEQ ID NO: 15458 - DNA, 20 bp, synthetic construct
  source 1..20: mol_type = other DNA
tcataccgaagcaattctgt

SEQ ID NO: 15459 - DNA, 20 bp, synthetic construct
  source 1..20: mol_type = other DNA
tgggctcgattgatggatac

SEQ ID NO: 15460 - DNA, 20 bp, synthetic construct
  source 1..20: mol_type = other DNA
aaacaacgagtaccttgtgc

SEQ ID NO: 15461 - DNA, 20 bp, synthetic construct
  source 1..20: mol_type = other DNA
acggatgcgtgagcaaaggt

SEQ ID NO: 15462 - DNA, 20 bp, synthetic construct
  source 1..20: mol_type = other DNA
atacagttctcctatcaagg

SEQ ID NO: 15463 - DNA, 20 bp, synthetic construct
  source 1..20: mol_type = other DNA
cagcgagcaggtgtacgccc

SEQ ID NO: 15464 - DNA, 20 bp, synthetic construct
  source 1..20: mol_type = other DNA
cgatcttgccacgattgcct

SEQ ID NO: 15465 - DNA, 20 bp, synthetic construct
  source 1..20: mol_type = other DNA
gaaggttcgaaaccagtaaa

SEQ ID NO: 15466 - DNA, 20 bp, synthetic construct
  source 1..20: mol_type = other DNA
gcgagcgtcgcagattaact

SEQ ID NO: 15467 - DNA, 20 bp, synthetic construct
  source 1..20: mol_type = other DNA
ggttgcgatctatattcgga

SEQ ID NO: 15468 - DNA, 20 bp, synthetic construct
  source 1..20: mol_type = other DNA
tcaacgcaggtcgctcacga

SEQ ID NO: 15469 - DNA, 20 bp, synthetic construct
  source 1..20: mol_type = other DNA
tgcgaggtggaaaagtcaca

SEQ ID NO: 15470 - DNA, 20 bp, synthetic construct
  source 1..20: mol_type = other DNA
aagctactggtcggacccat

SEQ ID NO: 15471 - DNA, 20 bp, synthetic construct
  source 1..20: mol_type = other DNA
agagagaggttaataaggcc

SEQ ID NO: 15472 - DNA, 20 bp, synthetic construct
  source 1..20: mol_type = other DNA
atcgtaactcgggtgaccaa

SEQ ID NO: 15473 - DNA, 20 bp, synthetic construct
  source 1..20: mol_type = other DNA
ccatatgagggcgctgagca

SEQ ID NO: 15474 - DNA, 20 bp, synthetic construct
  source 1..20: mol_type = other DNA
cgtactgtaggcggcccaaa

SEQ ID NO: 15475 - DNA, 20 bp, synthetic construct
  source 1..20: mol_type = other DNA
gagagaggttaataaggcct

SEQ ID NO: 15476 - DNA, 20 bp, synthetic construct
  source 1..20: mol_type = other DNA
gcttgtacgatgtgtttgca

SEQ ID NO: 15477 - DNA, 20 bp, synthetic construct
  source 1..20: mol_type = other DNA
gtcgttaagagggaaatcgc

SEQ ID NO: 15478 - DNA, 20 bp, synthetic construct
  source 1..20: mol_type = other DNA
tccgcgagttccgcccaata

SEQ ID NO: 15479 - DNA, 20 bp, synthetic construct
  source 1..20: mol_type = other DNA
tgtagagggcctaacgagtt

SEQ ID NO: 15480 - DNA, 20 bp, synthetic construct
  source 1..20: mol_type = other DNA
aaacaacgagtaccttgtgc

SEQ ID NO: 15481 - DNA, 20 bp, synthetic construct
  source 1..20: mol_type = other DNA
acggatgcgtgagcaaaggt

SEQ ID NO: 15482 - DNA, 20 bp, synthetic construct
  source 1..20: mol_type = other DNA
atacagttctcctatcaagg

SEQ ID NO: 15483 - DNA, 20 bp, synthetic construct
  source 1..20: mol_type = other DNA
cagcgagcaggtgtacgccc

SEQ ID NO: 15484 - DNA, 20 bp, synthetic construct
  source 1..20: mol_type = other DNA
cgatcttgccacgattgcct

SEQ ID NO: 15485 - DNA, 20 bp, synthetic construct
  source 1..20: mol_type = other DNA
gaaggttcgaaaccagtaaa

SEQ ID NO: 15486 - DNA, 20 bp, synthetic construct
  source 1..20: mol_type = other DNA
gcgagcgtcgcagattaact

SEQ ID NO: 15487 - DNA, 20 bp, synthetic construct
  source 1..20: mol_type = other DNA
ggttgcgatctatattcgga

SEQ ID NO: 15488 - DNA, 20 bp, synthetic construct
  source 1..20: mol_type = other DNA
tcaacgcaggtcgctcacga

SEQ ID NO: 15489 - DNA, 20 bp, synthetic construct
  source 1..20: mol_type = other DNA
tgcgaggtggaaaagtcaca

SEQ ID NO: 15490 - DNA, 20 bp, synthetic construct
  source 1..20: mol_type = other DNA
aataaacacaaagccgcgta

SEQ ID NO: 15491 - DNA, 20 bp, synthetic construct
  source 1..20: mol_type = other DNA
agcaggagcatatgttgctc

SEQ ID NO: 15492 - DNA, 20 bp, synthetic construct
  source 1..20: mol_type = other DNA
atgcatcattcgctgaggga

SEQ ID NO: 15493 - DNA, 20 bp, synthetic construct
  source 1..20: mol_type = other DNA
cccgaagctctaactgcatt

SEQ ID NO: 15494 - DNA, 20 bp, synthetic construct
  source 1..20: mol_type = other DNA
cgtgcgattcgtgccactcg

SEQ ID NO: 15495 - DNA, 20 bp, synthetic construct
  source 1..20: mol_type = other DNA
gaggacaaatgcggtctgat

SEQ ID NO: 15496 - DNA, 20 bp, synthetic construct
  source 1..20: mol_type = other DNA
ggacttctcggaacggtcct

SEQ ID NO: 15497 - DNA, 20 bp, synthetic construct
  source 1..20: mol_type = other DNA
gtggtagaaatatgctgcag

SEQ ID NO: 15498 - DNA, 20 bp, synthetic construct
  source 1..20: mol_type = other DNA
tcgcaacggttgttaatatg

SEQ ID NO: 15499 - DNA, 20 bp, synthetic construct
  source 1..20: mol_type = other DNA
tgttaatatgacaggccgct

SEQ ID NO: 15500 - DNA, 20 bp, synthetic construct
  source 1..20: mol_type = other DNA
aaacaacgagtaccttgtgc

SEQ ID NO: 15501 - DNA, 20 bp, synthetic construct
  source 1..20: mol_type = other DNA
acggatgcgtgagcaaaggt

SEQ ID NO: 15502 - DNA, 20 bp, synthetic construct
  source 1..20: mol_type = other DNA
atacagttctcctatcaagg

SEQ ID NO: 15503 - DNA, 20 bp, synthetic construct
  source 1..20: mol_type = other DNA
cagcgagcaggtgtacgccc

SEQ ID NO: 15504 - DNA, 20 bp, synthetic construct
  source 1..20: mol_type = other DNA
cgatcttgccacgattgcct

SEQ ID NO: 15505 - DNA, 20 bp, synthetic construct
  source 1..20: mol_type = other DNA
gaaggttcgaaaccagtaaa

SEQ ID NO: 15506 - DNA, 20 bp, synthetic construct
  source 1..20: mol_type = other DNA
gcgagcgtcgcagattaact

SEQ ID NO: 15507 - DNA, 20 bp, synthetic construct
  source 1..20: mol_type = other DNA
ggttgcgatctatattcgga

SEQ ID NO: 15508 - DNA, 20 bp, synthetic construct
  source 1..20: mol_type = other DNA
tcaacgcaggtcgctcacga

SEQ ID NO: 15509 - DNA, 20 bp, synthetic construct
  source 1..20: mol_type = other DNA
tgcgaggtggaaaagtcaca

SEQ ID NO: 15510 - DNA, 20 bp, synthetic construct
  source 1..20: mol_type = other DNA
aattgcgggaatcggcattt

SEQ ID NO: 15511 - DNA, 20 bp, synthetic construct
  source 1..20: mol_type = other DNA
agcgcacttctgcataacta

SEQ ID NO: 15512 - DNA, 20 bp, synthetic construct
  source 1..20: mol_type = other DNA
atggtcggtcattgccgcaa

SEQ ID NO: 15513 - DNA, 20 bp, synthetic construct
  source 1..20: mol_type = other DNA
cccttcgatgcatccgaatg

SEQ ID NO: 15514 - DNA, 20 bp, synthetic construct
  source 1..20: mol_type = other DNA
ctacttaggagttgtggata

SEQ ID NO: 15515 - DNA, 20 bp, synthetic construct
  source 1..20: mol_type = other DNA
gagttaacggagacccgcca

SEQ ID NO: 15516 - DNA, 20 bp, synthetic construct
  source 1..20: mol_type = other DNA
ggatgcccaagattgtagag

SEQ ID NO: 15517 - DNA, 20 bp, synthetic construct
  source 1..20: mol_type = other DNA
gtgttcagacgtcgttctac

SEQ ID NO: 15518 - DNA, 20 bp, synthetic construct
  source 1..20: mol_type = other DNA
tcgtaaagtaggcgagcgtt

SEQ ID NO: 15519 - DNA, 20 bp, synthetic construct
  source 1..20: mol_type = other DNA
ttaacaacccgcgggccgaa

SEQ ID NO: 15520 - DNA, 20 bp, synthetic construct
  source 1..20: mol_type = other DNA
aaacaacgagtaccttgtgc

SEQ ID NO: 15521 - DNA, 20 bp, synthetic construct
  source 1..20: mol_type = other DNA
acggatgcgtgagcaaaggt

SEQ ID NO: 15522 - DNA, 20 bp, synthetic construct
  source 1..20: mol_type = other DNA
atacagttctcctatcaagg

SEQ ID NO: 15523 - DNA, 20 bp, synthetic construct
  source 1..20: mol_type = other DNA
cagcgagcaggtgtacgccc

SEQ ID NO: 15524 - DNA, 20 bp, synthetic construct
  source 1..20: mol_type = other DNA
cgatcttgccacgattgcct

SEQ ID NO: 15525 - DNA, 20 bp, synthetic construct
  source 1..20: mol_type = other DNA
gaaggttcgaaaccagtaaa

SEQ ID NO: 15526 - DNA, 20 bp, synthetic construct
  source 1..20: mol_type = other DNA
gcgagcgtcgcagattaact

SEQ ID NO: 15527 - DNA, 20 bp, synthetic construct
  source 1..20: mol_type = other DNA
ggttgcgatctatattcgga

SEQ ID NO: 15528 - DNA, 20 bp, synthetic construct
  source 1..20: mol_type = other DNA
tcaacgcaggtcgctcacga

SEQ ID NO: 15529 - DNA, 20 bp, synthetic construct
  source 1..20: mol_type = other DNA
tgcgaggtggaaaagtcaca

SEQ ID NO: 15530 - DNA, 20 bp, synthetic construct
  source 1..20: mol_type = other DNA
acacaaagccgcgtagttat

SEQ ID NO: 15531 - DNA, 20 bp, synthetic construct
  source 1..20: mol_type = other DNA
aggcaagagtttgtgggcgc

SEQ ID NO: 15532 - DNA, 20 bp, synthetic construct
  source 1..20: mol_type = other DNA
atttccgttagagccgagtg

SEQ ID NO: 15533 - DNA, 20 bp, synthetic construct
  source 1..20: mol_type = other DNA
ccggcagcgttccgttacat

SEQ ID NO: 15534 - DNA, 20 bp, synthetic construct
  source 1..20: mol_type = other DNA
ctcagagataacgcatatct

SEQ ID NO: 15535 - DNA, 20 bp, synthetic construct
  source 1..20: mol_type = other DNA
gatgcccaagattgtagagg

SEQ ID NO: 15536 - DNA, 20 bp, synthetic construct
  source 1..20: mol_type = other DNA
ggcggaagtgaacacgcttg

SEQ ID NO: 15537 - DNA, 20 bp, synthetic construct
  source 1..20: mol_type = other DNA
gttgggacgcttgaagcgca

SEQ ID NO: 15538 - DNA, 20 bp, synthetic construct
  source 1..20: mol_type = other DNA
tctcgccttagatccggcgg

SEQ ID NO: 15539 - DNA, 20 bp, synthetic construct
  source 1..20: mol_type = other DNA
ttagggcggtagagagaatt

SEQ ID NO: 15540 - DNA, 48 bp, synthetic construct
  source 1..48: mol_type = other DNA
ccacaggaagtaaagcacactctttccctacacgacgctcttccgatc

SEQ ID NO: 15541 - DNA, 48 bp, synthetic construct
  source 1..48: mol_type = other DNA
ccacaggaagtaaagccacaacgggagctgtggaattggttcacctgg

SEQ ID NO: 15542 - DNA, 48 bp, synthetic construct
  source 1..48: mol_type = other DNA
ccacaggaagtaaagcgtatgatggtgttgcggcttctcgcttaacgc

SEQ ID NO: 15543 - DNA, 48 bp, synthetic construct
  source 1..48: mol_type = other DNA
ccacaggaagtaaagctgttgcatctccacccggattgagccttcagc

SEQ ID NO: 15544 - DNA, 48 bp, synthetic construct
  source 1..48: mol_type = other DNA
ccacaggaagtaaagctggactaagactcgtcctccagcggacctaag

SEQ ID NO: 15545 - DNA, 48 bp, synthetic construct
  source 1..48: mol_type = other DNA
ccacaggaagtaaagctcggcgttgtctgctatcgttcttggcactcc
